United States Patent Application Publication US 2026/0058010 A1 - sequence listing, part 24

SEQ ID NO: 292 - DNA, 522331 bp, Homo sapiens
  source 1..522331: mol_type = genomic DNA
ctgacccattagctgagcagagcggacagagtgaagaattgtgtcttcctgccacatgctccaccatcaaatcctgccctcttgcaaaagcttgttagtggtcacaggggaatggagcaagactgtttttatggttccacagaaaaggggggagaaatctatcatccaaggcctcctgaaggcgcagcaggaggaacttgcaatcagatgattactttcttccagtcccgctgtcacctggtttctgcgggccccttaagtaaattgcttaaccctatgcagagcctcagtttccttatccctaaaatgggaataataatcctcactcacaagagataagaatgcatataaaagcactctacacgcagtttttgcttggttcttatgggcttcctgtaagaacctgaagggtgggcagcctcatttttcctcgcagcaccccactggcttctgcaatctgctctttgctgctctccggaggttgactgagctggaatgatggcgccctgttgaccagagggttgctggctgttttaaattgtcctatttgcatggaatgaagtttgctatggtaacaaggtctggtggctggaatccagggccccagtgaaaaatgcaaagcctgtggtctgggagagaaagaggagctggagagggcatatcaacgtcaggttacctcagttcttctgtgaagaggggatgggtaaactgaggcagcagggctcaactcttctgctcccagtagaagaaagggaagaagccccatcgacgccttccttcttatctctcaacctcatctctgtccccgccaatattcagcccggctaagaagcttaggagctggctaaggctgctcctccacctggatgcacacacagggctagggctgtggagaggcgggagcaccagcggcccacgccgaggaagataggcgctccctcctggggtgggcagcgcaggtctggcctgcgggtggggggtggagagtgagaggcacgcggggcaccagctcagctcccctctggggatttcgtactcgcagtttaaggaaccggtggagcacgaactccactcctgagctggcgcaagcgtctcccttccatggagatccaccccggctcccctctgaggccccctttccaagcaccctctcttccgagcacccagcacctccccaaccttagcacggctcggggcaccagttctccagggcgggggctgccccaccgctcaagggaggggacagagggccggcctcggtccaggcgacccctgcccctcgccaggggcgccaccttggccccctcccgactgccgtccgccgcctccgcccccccggggggtgtgtctccgaagtacgggggcgcgggaggccaagggtgcccccagcctccgaccgagaccccctcccgagccggcggcgaatggtaggctccatttaaagagtgcctggtggcgcgcggtgtccttcttggagcagctctcggcgcccgcccgccggggtctcggcgatcgctgctcctcctcctccttctcctcctcttttttctcctccgcctcctccccccgccgcctcgccaccgccgcggctagggctggaggcgccgctgtcattcctgtgccggaggaaccggcgctgccggtgcctgggggtcggggcgcgggcgaagccgggccgcggaggacacaacaggtagagccgggggtgcccggccgcgcgccccccgcgcatcatgcagctctttgtcacctctctcgcccccaggccaaaatcctgagcatgatggaagacaataagcagctcgcgctccgcatcgatggggcggtccagtcggccagccaggaggtgaccaacctgcgagccgaactcacggccaccaaccggagactggcggaactgagcggcggcggcggccccggcccgggcccgggagccgcggccagcgcctcggcggcgggggactcggcggcgacgaacatggagaacccccagcttggagcgcaaggtaggatcgccccggcgcccagggcggaggaaggcgagcagagcacgcccggcctcggaggtggccggggacccggggtcccccacacccggggcgaaatcgctttgcattctggcttgtaaccctttccgcccggcggtggccaccgctgctctccggctgggagttgcaggctgctgtcattcacgaaaacccgagcgcagtgtgcacggggtcacacggtcacaccggccccggccagcctgagcgaggcgcagccggcgggtcccttccggcatcagaaagtgccctttccgtggcaccagccccctagctccgtgcaaacttttcatgccggggccttttccccaccccccgcaggggtgaatggcacagttccccccacttccttaggctccttcccagagagagctccgggctctgccgccgtggttgggatagaggattgcactgctgtgcacttttctccgcggatgccaaatcccttggctcagttgcatctggactttattttcttctcatttgaggtctctcaggcattggaatctatagatgcaacagtagatgctcagctcagcagggagtttaaatttccgcaaatataaacaccgagagcactttccagggggatactgtagacctcaaaggttgagcggtagagaaatgaaggcttagggtggtgggctgcagggagcccgtttgaagggactctgcggtttagagaagaggaagaaaaagacagttggtttgtgttcacattgacagagattaagctctgaaaccccctgcaagacataaaggcggatggggcattccctaaaatgtactgtttggtttctgtgacttagaaagtaaaagggtaagcaggctttgggggattttttttttctttttgcctaattgccctttaagaaacagtatcactggttattaatatcatttgaattgcaaattaaactgctgaaatccagaacaggacagaaacaaatctccagtccatgaggtccacttgtctaaatatgtcacttgaagtgcaaggtaccaattgctcagtggctcaaaatgattttctggttctgttgtcatttcaagagcttctcttgagggttgagagagtctgttttcctaagaatctggttctctccatcagtctctgtttccaccttatcttcctgggaaggtgtgctttctttgaggtgagatgtgaagcctgcccacgtgcagttttatgtcgaattccaagtcagatcttaacttggtactcccggagcctgttggaagtcttaggaattggggggagtactttggtaaggaagtagccatgacgtaatggtgagaaggtgttgtggtcctagtgcttgctgcaagcttgacatgtggttattcttgtcatccttgcaatgtcattgtgtgcgaaagaacattctccactggaacctgtgcaaaaaaaaaaaaaaaaaaaaaagacagactgcaaggtaatgcttcactttttataggcagaggctctgctaacattaaagaaatagctaagaactggcattttgctaagaatcaaaagctgtatagtaaaggacactgaacaatgctcgtttatttcccactgtctgcccctttctccgcgaaggaaaagttaagtggctttttatctgagtcctgggtctggttgtagactgggcaggctaaggcagtcaacgcagtaatgatgtccacatgctcaacttgaaaactgacatactcgcggatggttaaattgttgtagtggagcaacagggggctgattccttgttcttttttcctacacaaatgcacagggctgtggaaatgaaaatggcttttggatctcttggatatccttaaaaacacataaaaccagcagctcccatacgctctcaggactgtgcctgcccatgtcagtggctggctgtgggtggtaggatgaagggtggtcttgatttctcctctttgtacattggtatgtctcaaaatctttcctaggggcactttgtgatttttataatcagaaaataaaatgttcaaaggtttaaactctacttgattgttggccgcataaccgtctaaactgatatgcatttcaacagatgtgatggttgaaaagaaaacaagcccccgtataagttcagtggggtatcatttacttgtctgtagcaacagtacttgatacattatttagcctctgtaagtttgggggattttttttttttgatgggggcgggagttgtttttgtttgtttttgtttttttcatagcctgtggcagcatcctgctagcacagaaaccctctgcagaggtggtctggtagtttcttttgccattgctttcattatcctaaaaagaagccttgagttctcacacaagttaattttaaagtgcaattgattgggttccacttgattcttcgtaatacacctccagggaggctcccagaggctcagctcctcagggtttctgactgttcttccaaattagtcttgtgttttcattttgtctgtgttggtgcagttcaatgggcccagaccctaagagtgtttaagtgctattgagttatcagttttcaaatcaaggttttgaataaaacgagtatctttgcatttcaaaatgcaaccgtgtaagtcatcttttaacgaaagggcattatgcacatattaaatgcatgctaatgtaactttaacaatattagtacaaatggttttgggaaagagtcaccttttgcttcctctgccaagagactgttagattcattttcaaatgtttttgtttttgttttttaaattctttttttaaatgaatgaagcaaactcatcaatccatcattggctgttttgttccagggatgacaacgggcagtaggtaggttggtatccccttttgatgaagaaaatttgggttttcctagcgggttaatgcagtgtgtcatttaaacaaaatattaacttggttggtactccctgtgagctggcatggttgctatgtaacagaatctagaaagtgaactgctgaaaatctgggctttcggcacttcggaggatattctttcggaatctgtgttgaaagaattcctggcagccagcccatcttgtctctccctcctgcaactgagttggataatccttaatgagaatgctggcgtacagtgcagagggcgtccgtgcagggtgacacatttcagagctccagaggctgccttttgggtcggtggggtcacggcagcctttgacaggtggacagaaggaggcttggaaagaacagagccaagcatttgttccaattcatcttgttgttggtagccagagaagggatttgtttaaagtaacatttctaagctgttttcctcagcataacatctctgggaaaatgtgtttaaaatgcttgctgttctttgaggggaaaatgtagcagtttgtttctctgaaaaagttttatcagctgatgaatgactaatattagattcagttggttgctttgctatgcatagaacaaaacaattaagtgctatggtacccaattcaaataggtgttaactgtatataacaaaatacttaatgcccagtaggatgtatgcctactgtcattagttttctttgttaaagaaataattgtatttgtattcctatgcaagtggacgtgctgatagcatctttctttggtgtggaggacttcctgcctactgcatttgttagaaggggatggaggcaagggtcggtttcctgtacctttgtacatttccataaatgcgtgcaagttgtatttttctctccaggcattaaaataggctgttacttaaggcctgacagctctcatctaccattactacaacactggaaactctttcgtgaagtataaattacctttggagtgaattgaatgtgtgagtagtctgtggagacgctagacactgtcgctttgcaaagtaagttctgtcttttggcatccccttctcaattcattctgcctctgctcttgttttcctaagtagacttttatcttttttgagaaagagaattttcaaatggcagagaggatggaacaaaatgttggggaatctcgggccttctgttagcttgccactaagttacagagctcagcaagtagcctgcgccatggttttccagccagatcaaggggttaaaatagagtgtgtcttttcctaacctgtcatgggatggggattcagtcttctccctgaaaattgtcatgtgtggtcacaaagagattacttacagatcagtacagtgtggttgaaattacttattgattggggattatttactatctttccattgtctttggaaaatgccttcaaaggacctcttaagtcaagtctctgattctggttaatttcatgcttccattgtgcacttcatgatttttagtggttttccaacacctctttgatgcaccccagaagtctgagctgacctgactcatctaacaggagcctggtcacatatctttccagggtaaggcatgataggccctctctccatccctttaccctcttactcctcaagaagactgttggcactttttaggaatcctatagggttataatgtgtgacttcctggctgccagtgtgtttgtagcagatgggcttggcaggtggcaagagctcattggaactttgcctgctcaccgtgcatatcatatggggcccagaaggtcaagcttgggatttggccacattcactgcatgttttctttatgtattataaatctatatattcattcctgggctatgtaggtaaggacagtgaaatcaacacgaactcctctgttctttccataccttaatggtttgcctgaacattggtccctggcttcttaccccctgccatatatcagggggttctgcctgctgagcccagagaatgggtttttaagtgatgttgcacgtggaaataggtctcagtgtttgggctgcatattagggtgagtagcacaaaatatggcaggagtgtcaccgccagcagtcattgcactgccttggtgccttgaattgcaggcatagtgggttcagaaagaatgatttaggaaaagacatctttcccgaagccaacagggtggccatccacaggggcagatcatacctgacgattcatagcagctaagagttctgctgacccctgtcaccactctccagttcccctgccaccaccctccaaatcccctgccaggcccatctcagttgtggagaagctggaagaagatcagggaaaggaacgccttcttcctccccgtgtggttgcacgacaccagaacattcttgcttgtttgatgcaaccttgatccaagtggtggaggcgaggttgtgctctgtgggcactcctgctacccccttggagtcctaggctgctggaaacatgaaagaagctgaacatagttttaatgagtttggcaagaacaactgtttgagcaggtggctgctgtgtggtacaagatcattggggctaaatttattctgcgggctttgttggctgggtcatgtcagacccttgggtcaggcttctgaaaggtccctgcccctttactttctgatgaattgagacctcagcacaggagctcagatggagcttggaacaggcagtcctgcaagcaaagagccccagggcctctgcccacttctccagtcaggctggagaggggagagaagttggggagaggaggtgtcctgcccagctcccttctcctctgtcctcttccaccacagcaagcgctatgttacctttgtggggatgtaaaggccttccattcccaatattacctctgctctacagattgtgtgaagtaatgagtcattaagaacagagcgccccttttaaagaagctgatattctccactcatctttgcatacctcactattattattctcagaacttaccttttgggcatgccacaagacgctggggattctgggaccatcttgaagcctgtagtttctttctctttggtcaaggtgaatagtttaatgtagcagtaaatgagaactggtttcattgctttggtcaaactttttaataaataataatatgcacttacaatatatcaacttccctggcaagcgcttaacatgcattattgaatcctgaggccagcgaggtgacaactatagctggcccccacccagcacagtaaaaaatctgtctataacttttgactcccccaacacttaactcctactagcctactattgaccggaagccttatgataacgtaaacatagcataatataaacagttaacagataacataagcagttgacttatacatacttttatgccccatgtattatgtattttataattaagtagagaaatcaagtaagctagagaaaacaaaatattaagaaaatcataaggaagagaaaatatatttgctattcattaagtggaagtggatcatcataaaggccttcatccccatcatcttcatgttgaggaggaggaggaagaggaagggttggtctcgctgtctcaggggtgccagaggtggaagaaaattcacatataagtggacctgcacaattcaaacctatgttcttccaggtcaactatgtaatgcccgtttttcaaaagaggaaactgagtctcagagaaactaaatcacttgtttgcagtgagatagtgatgactacaatggggatgatagtagcagacttcagcatagtgtgtactctgagccagatactgttctaagtgattttctggattaatgcatttcaggaatgcattcagtcttcataatgacttattgggcaggtaccatgctcgtacccattttccataggagaaaactaaggcacagagatgacacatttacttgccaaagggcatatggtcaggaagtgaccaagctctggctctagagtctgtgttcttattcattccactttgacatccaggatcactcaactgccacatgactgagccaggaatgcaaacccactaggtctctctgctgtttaaacctgtgtatgcttctctgccctgcctcctaagtcagaagcatcctttggcttgttgcattagggaggttcagggagctgtagccttgtctctactcctgattaaactcctgtttccctagactggtggtagttcctgggtccttacggtaaagtcttatgcttgagagttaggcaatcaaccagcctctcagccatcaactgacaaagaagggactggattctgtttgcaagactggcagcccaggggccacttatcactaataaaaaggactattttgatcctggacttggagcctccaatttcttggacttcgtgtgtttcatctctcttgggaaggatgagtccaggcaaagccagagtcttgtggcagccttattctccatccatcccatgtcttttcttttgcctgagttctctctctgtggcctcagtagcctctagcaccccaagaccatgcccaacagaggacttattaacctcaaacagataccttcatgctagggtttcttagccccagtactattgacatgtggagcagataattctgtgttctcagggggctgtcctgtgtgttgtaggatatttagcagcattcctggcctctacccactagatgacagtagaacccttcacactccagttgtgacaactaaaaatgtctccagaagttgccaaatgtccccttcaggtcaaaattatccctggttgcgaactgctttttatgcagtggtgttaggggagacttcaattgttagtcttggaatgacagctctgtgaggtcagggagttttatctatattttactgtatcctcaccacctagagcagtgctttgtacataatgtaagagctcagtaaatacttgctgaatgaatagatggatggatgggtgaatactaaatgatggggtgtgtggactttggtctactttatacatggtatcatgaggatcattgatttaatgatagatgattttaattgagtgcttacataccatataacaagcactgtttcaaattctttacctataatacctcaacgaatcctttaaaccaccttatgaggtaagtacagtgtttgtcattttacagatgagaaagttgaggcacacaaaggtcacatgacttgcccagggtcaccgagctagcaagtggcagagccaggatacaaacacaagccagtgtgattccagagactgcctggcgtctccaccaggatgctctggagcttggcatcctttttcccattactgcccaagaaactgttattgttctaatgttggcattgtggcaattataattaggatttgcatgtcagacactaactcattcatcgtcaatcctcagagttctgctggacaaaatatgctctgtcacttctgaagaatccgtagccagcagggactcctgtctggccagaggtaagaggactgcttagtgctgagccatgttcaaacgtgagaatctcttctctctgcctcactgctgggctgtgaccaaagagaatcgcagaggggacttgactttcctacctttatgggaaagggaacagtggaccccagagcttcttagtggggttatggctcatttttagcaaaagggatgttccaggatcagaactggggaggcagagtgacttttgagatcatccaagggggcaataagagcaatagccagtgttcgttgaggctttcccagatactgtgatgagctcaacaaacatttcctcaatttaccttcatattacagagagttagatattgttatcctctccattccacagatgaagacattgaagcttagaagggttaagttgcttttccaagctctggaaagtagtccactagtgaacagaaaaacaggggattagaacacaggttcacacgtttgactgaccctgaaatctgctcgcttcgttaagacgagaatatccagatgtcactatcaggtagcccaaagacatgccagtaggacggttttgctattttgcttaacgccttcccttcctctttttttcttcctttcttcttcctcgcttctctctgtctccatctattgtgagagattgggcacataggcccagagaccacagatttaataagatggggactgagttatcttggactcacagcctcataggtataactgacatgaaaacataattttctaataaaggtctagatgggtgtaatggaaaaatagacaatgaagtgacaaatacaggagccttcacagatgtgcatgacaatggtaatacgtaataaaaacaggctggaaaatacactaatttcaccactaggggttaaaactggctgtgatagattattaaaaagtacaactgtttggatagattggaattggacactgcagagaacagctactacctgggaccttctcccccagagaaagagcgcgtcttaaggagaaggaagatgtggatgatactgggtttagatcttgaataatagcttttctgtcctcttttcaaagagagttaaaaaaaaagatgtgaatttcaggacaggcatacctgcatcttttaaagtaagctcacccgttgtatcatcttcgcagccaggtctcagacttctggtcagcggcaacaaatgaattcgttcattttccttgattgacttaaacatggtgtatttaaaccattgaacatggcgtatttgctttaatttggcaagtgcaacctggaacacagtgggattaatgtcatctcttttttttaatccccactcctgccatttgaaattggcaagaatacgctcaccgtttcttgatggtggcaaggtaggagagttagaaatttgatactgggcctggagagtgcagttgtgggaccatagagcgtgacaaatgacacttggggaaacatgacctggaattatatgtgtattgattatcttaattaatgtgctcatcaactggattgcttttcctattcctataaagtttactatgtaaagcaagaaaaaacaggactattcagtgcatcttgagatttgggagttaacagaaaggcaaggcttgggtgccattttgtgtggatggtcagcctgttctcgggcaaacatgctcagagtgccctgtttgcaatttgacatggtaccaggcagccctgctggaggagaaaggcatgtttaagttttaatggaagtcctgtagagaaggatcatgatctcatggtcagcttccacaggctgggtcattctcatcagcaactactaaaacaaaacaaaaagcaaccttgtttaaactcggctgatcaacaccacagttggttctaccatgagtcaactcaaaacccaccctctaactttttcagtgttatcgcatttattctaaaacaagagcttggtggaacatcaatttacagagctgatgctcagcacccttttttcaggattctcctgcatttattcactcttcctcttttcttggcaatcaagaaggttcctgggaagcgctacagtctctctacctagacatctctttgcagaatccaaagactttcacaggcatcatcccagtggacccttccaagtggtccatgtgattgaattgaggtagacgcagcaatctatttctcagctcaggaaactgaggcacagcaatttaagttgatttgtctaagattggtgagctggttattgaaccaacttcccctccctttctccacactaagatcaggcccagctgcacagtgtgggaagagaactgccccatagctcatggctgggtgaagtctgaccttcgctgggccacgccctcttgggcatgggccactgcatcttgtaaggcctggatggagacaccatcacttcaagactgtgccctcatactctgagcctcctgtccaatgagtggcccacgatgaaaggggaatccatttttacaaatgaatacaattttttacactagattctttcctcatttcagtggggttttacaatcatctgacttctcttccaatgacctgtttgtttgtttgtttgtttgtttgtttgtttgagacagagtctcattctgtcacccaggttggagtgcagtggcacaatctctgctcactgcaagctccgcctcccgggttcacaccattctcctgcctcagcctcccgagtagctgggacacgagtggctgggactacaggcacccgccaccatgcctggctaatttttttgtatttttagtagagacagggtttcactgtgttagccaggatggtctcgatctcctgacctcgtgatcgacccacctcagcctcccaaagtgctgggattacaggcgtgagccaccatgcctggccctagtgacctgtcttcttaatgcctgagcttagagtttctcctcttctagtttccctaacaagcagttagggatctgtaaacaaggtcaggaattacaccaggagaatgtcctgtttatttcagtggcctagatctgacaatggctcccctgtggagaattttttttttttttgtactctataccatcataatttaggatcttttactctggaaaatacacctgcatggagactagtggatgtgtgtattctttgggtaccggagccaggatgtagcaatcacaataaatctgcctgatttctctctctttttcactatccctttagggagatcccattagacctttagaagctcttttattcgggtctttgggttaatatgcaaccaaaatatgttggtttgaattctccagctaacccgttggttgtttagatgcctgtggtcactttcgctgtggctgtaactgcctggacagcaagtggtccagcttcatgcccagatcctggactcaggtgaatggaagtttatccacagatcacaagccagccaaaagtatggcagaaaactcagggagatgggaatggggcatttttttctgtgcatcttagaggaatggaaggggaggtatcaacccagtggtctctgcagtgcagcaggtgacctgctgaggtccactgactcctaagtggcaagtccaatggctgggactctgatctctgtttcaattccagagcaacaaggaacgttcttctgggctttcccaacttctgacagcaaaatagaaataatagaccttggaacttcatttgaagatctatttataatggattctagaaaagtagaaagtatttttgaggatcaaaatgtgttggggcttttgagttttaggtttgtattagaatgaaatgcataagattatgcaccctcccgaggtgggaggattgcttgagcccaggagttcaagatcagcctggccagtatagtgagacgctatctctacaaaaatcttaaaaattagctggccttgttggcgcacacttgtggtcccagctacctgggggggctgaggcaggaggatcaacttgggaccaggagtttgaggttgcagtgagctatgattgcatcgctgcactccagcttttgtgatagagcaacaccctgtctcaaaaaaaaaaaaaaaaattaagatttccccaaactactggatattatagttattcatataggcatagatgaaagtgcttcttgttttggtgtgaagttcattttagtgcttcccctttgtggcttcaatagtggagctagtgtggaagttggcaaactttttctataaagggccaaataataaatagtttaggctttgggcaccataaaatattgattgcacttcctcaaatctgctgttataatgcaaaagcagccatagacaacatataaataaatgggcatggctgtattccaataaaactttatttataaaaacaggtagctctgaggtgatcatttgccaacccttggacatgtattaatcgttctcgtttatttgtatctgacccagctcgacacacaggaggagcttaataaatggtgatgaatgagtgagctagtgaattaaacatgagcaataaaactactagattatagtactaaaggagcaaaaatgagaagttaattactaggggtgttgtggttaatggacaggagaggagacacttgctgccgctcagtggtttgagatggagtcacttgtgttcagcctttatcactgacttcccaagacccgcgctctaacccctgagctgtagagcccttgccttcatcactgacttcaaaagaactgagaagggacaaggaatcattggtcatggtgagatgcagggcgggacacttgacatctgagcctcagtttcattgttatgaaatgaggtcacttctatcttccagataatgcagcaaataaatctgggttcaagggaatgagcgaggcctgattcagatcctggtgatatgatgtaggtactgtgggacattccagctctcagcttcctcatctggaacatgaggccgataacacctctgtggtagagtgactgggctggtttcatgcaggggtccttgacctcagcactgtagacattctaggccagataattctttgttgtgggggcgggggtctgtcctgtgcattttaggacatttagcagcatctatgccaatagcaaccccattatgtgacagtcaacatcatcagataattgccaaatgtccttttggggatgaaagcattccctgcttgggatctgctggtttaagggactaacatactgtgcctggcatggagtttagcagactttgggatcccttagatagaactcttggttattaatagtgcgttgtattattgaactatgaattctctcccctttgacttactaataaaaccactttatttccttagctgatttctgtctcccaaagacaagattgggtatttttttccagaacccaggtctttctcctgaaccttctatgttgcttagaagccttgctcccaggatgagccgaacttcctatgatgtcctgttgagtgtgcgtcctagccttttaatgtataggtactctagacttgcattcgaggttatggtcagtatcacaagtgattcatacaagaaatcatccagatatcttcaccatgaaccaaagggaagggtacagactgagaagctcaactcacagaggctggcaggctgaggccggggattgtactctgagggaaaacagatagtatgccgcaaactcccaccaacaaaatgatcatttccctggtgagcaggcacacagtattaacattagccaggggccagttttcaatagtttaaactttaatcaagatggctattccataccacaagttaacatctggatttcatgtttctgccatccatattcccactgaatagtgattcctagtgtttttaatgaagagagaaagaaaattttggctcctacattttagtagtcatatttttgctatctgttggagaaaatacataaatgcaaaagattacaatgaattcagtagctttgtcaaatggttacagcttcggtattgcatatatttgaaaactaatggtacatacatgcaagaaaaataattcattgtgcccataggcagcaggttggagatgtgtggattttggacttctcgtcaccttctctggccacccagagtctctgcggcccacaggttgggcccggatcagtgcagtgctgaacaatgtcaggtgcagtgaggtgcttgacaagtgccttggaaaactatggcctctgccctgggactttgagtcttctgccgattttaagggattcctctgttcttcaaacccaactctgcctccctgtgacacaactgattaacctgtaatttgggcccctggctttcagaaaactctgcaaaatttctgcagagtgacttcctggtatgaataccagaaagcaccagttatggtcagaataacagaactggccccatgctagatttccgggaatacgatgcaattggccaactgccatcactaactagtgtcaccctgcctcatctccagcaatgtcctaaaacccctcaagcatgtgatccgtcatatcattttctcatttatgccaacactggataatggcctaatctctccagcagcattcagatttattagagaagatggcatttacaaaaccatttccctgttcctctgcaaacaccctaagctgtcttataataaaccactctctttatagtaagccttccttttaacagtggtttattccctgcaattaaaatcacctggaagagtccagaaactggttttcatttctcttccttcgtgtttggttcatctttggctggagggctctgcaggacttgggagtgaacattagagagaggcagaggccaaactttgctaaggatgagagctctgcagcaggacatggtcagtatgaggctggacccagcctgggtgaccatctgctgggcctgctggcaaagcacctcccgcgctgggtttagatgttcaggagaaaaatacatgcgcaaaaccaaatgtgatctggttgggaggacttttccgttcatggtgttttgctttcaagattgaccactaaagaaaatgacaagtttggcagccacggtatgttgtcatttgaatacaacccagagaaacattgagagacagtaatttctaggacaagggcctcccgggtttttgtatgaaagatttgtttgaacaaactaagatgctgatgcagggaagttcagcatctatagcacaggacagagatctctggagtccattgccaagtgcaaatgctgtctcttaacacttcctagctcggtgaggcgggcaagttgctttactaaaataggccttggtttcctcgtagggataatgctggtcctgacctcccacggctgttgtaggattcaggtagaatgtgtgtgatgtgcagagcacagtacttggcacttgccaattcccctgtaaatgtcgttaacaaatgttcacaagtctccagtatccctgcaggcactgaggaaggaaattgagtttattctttggtttctttgtcagctaacattcatgaagcactctatgattgacagagcactgtgatgagcgcccaggatacccggacaagtaaggtgccgaccacctgctggaaaccagaggagggaagagcagcagaggaaagccccattgtgggatccagagacctgggttctagcctcgagcctgcaactaagaggctaaagaagagcagagtgggccaggcatggtggcgctcaacacctgtaatcctagtactttgggaggccaaggcgggcagattatttcaagccaggagttcgagaccagcctggccaacatggcaaaaccctgtctctactaaaaatacaaaactacccagtgtggtggtgcacacctgtaattccagctacttgggaggctgaagcacaagaattgcttgaacccgggaggcagaggctgcagtgagccaagatcgtgccactgcactccagtctgcatgtcagagtgagactccatctcaaaaaaaaaaaaaaagaggagcagaggggacttctcacttccatgagggaagtgaggcttgtggttccaatcgtatggccaacgtgtaggctgtggcttcgccaccagcctccgcaacttgcaagaggcatcccgggaagtggcgtaggaactgagacactggttcagtcaaaatgagggcatttggcatttggtaagacttctctgaagtccctcccatttctgaatttctacaacttctgactattcataatatcacccaatccatcagttccaccttaaaaaatttcttaaaggacaggcagttcgtcttggggagtgtggtctcacctggcttgagcagaggtgatgtcagcctcccaactctgccagagacatgcgcaggagagacacttgaaagctggggtggagagaaggtggcaccagagggaagtgcccatgtgggttatggaatgacgcaatgcctatacaatccaggaagggacactgaagacagcctcatctggtctttactttgcagttggagaaactgaggctggagagcgcaagtgagtctgctgaggctatacagcactttataccagaacctgggctagaacaagacctctggcctcttggtccaatttgtgttaccctgacccccaagcttcctcatgcggtgtcccagctgctacacagatctgtgccgcagatcccagcagaacctttgtgtgccatcaactcatcctttctgtgccctcaaataacttaaattctgaaacagacaagctggaaacagaggagtcctctggtatggagtttatggcttggtctgactttctagggagcatagaagagggtgatttagaaaaaaaaaaaaagtacaagccagatgcccaaattaaaacactataattttcttggagtttgtgctccaagcaatgtaaataaaggtgagggctgggcccctctgcccataaatcagcgtcagcgaaggctcattcccctgttgtgtttagatatttcagcccatcacctatacctcttggcatttctgagatacaagggagagggttccatttgtcatcctgattgttctccctagggtttcttggagctgcgatctcagggttgccttttgcatgaaatacgaagctcagcgatagaaccaggacatttcaatgcaggcaggatacacttgggaaggctgggtttctgccctcgtggcctcatttgcattcactctgctcctgaccgtttgtaatacagtggtgggtgtccatcaaatcgctattaactccagccagctcctaaggggctgtctatgctgtcccttacaagtccaggggatggcatggcccatacctttggtcattcagtgagtgtcatgagccacttccattgttgtttctatttagtctctcaaggatcctgcaagacagcaaccttggttgtgtgactccgttcctttcactggattcagacacctgggttaaaccagcagccccaccacatcctagcatgccttcttgttgggtcccataacagatgttttgctatctatgttatgcggctgttctatgatacaggcatatttcagagatattgcaggttccattccagactaccacaataaagcaaatatcgaaataaagtgagtcacacaaattttttggtttcccagtgcgtatgaaacttatgtttacactacatcgtagcctattaagtgtacaatagcattctgtctgaaaagtctacataccttcatttaaaaatgctttattgctaaaaaatggtgatacagagacacgaagccagaacatgcttttgggaaattggcgttgatagacttgctgcatgagaggggttaccacaaacctttgatttgtaaaaaacaaaaacaaaaacaaaaaagccttggtatctacgaagcgcagtaaaacaaggtttgcctgtagctcgtaccttatggggtttttataaaaataaagtgagtaaatatacgtgaatcccggtgataagtgcatgggacatacatgctaaggattcaataaatatcagctatgaatgtggaactgtgtattcaagctgtccagagtgtcccatggaagacctgtagtgctgaagagtgacctttcttgggagtgacaacacgaccatttgaggaggagctagttaaaattggagtcttggtttttcaaataaaaatcccaaagcgcaaagtgtatgaagccttaatgtcctcatttattttgtggtttgatctatgggctttcccatttggcagtggcagaagggacttcccaagtgcccactgctatctgcgctcaccttaaatatgcccaaccagagtcttatctccgacagctcatgcatcaccctccctgggagagggagccccgctgacttgctgacagaccctcagttaatttctggattcttttttttctcagttatttatagctcagctgctgatatttcaagctctcattgctaagcaaggaaaggcttgaatgctgcgagatggcagctgagtccggcgcttgcttcactcttcatctagtttgtaaggtgtgtcccatgtccatggaaacacactggggcatggccccagccccggcgtgttctagtgatgagagtgaggatttgacatgaaaaggccaaagttctagaccgtcttctgcctcgagctggtgacatgactttggactaatcactttgccattcaagtctccattttcccatcaggaagatgagaagaatggaataaagggatcataattttattctgtacatatttcttgggcacctgccccatggctggccccatgctgggctcatggagttcatgaagctcctggggcagggagaagacaatggcaatgatgaagataataagtgacactaatatgatggagtacctagaagggacaaggcatccttctaaaagctatatatgtattttcgtgtttaatcctcacattgttttattagtagtccaattttgacaggtcaggcaactgaggcataaagtgattaaatcatgtgtctatgatatgaccacactgtgggtatagttgacatttgaactctggcccactgaccccaaagcctatatttttaaccagcatgtgtcactcttttgtcccaaaccatataatgacaatacactgtgacaagtacagtgatagtagtatgtgcaaggtatgtaaaagtgttgacaagggacactttgcccaggctgaaggaaaggtgaggggttccctgacagtttccaaaggagccttcgcttgagtggaagtctggaagggcaagtaggtcttctttgggtcaagaaggtgtaggtgggtctttgggcagaatttgctgcaggatacagacacggcaggacgacagcatggcttgttggaggagcagccagtgtttcggtttggctcaagatctgggtgggatgggagaattaatggggcattgagatgagagtaaatgagattgagaatgcaggggtggaagacagatttagaaggttctgataaactaagaaaaggaatccagttttactccatgcacaatgaaaaaggaatttaatcattcttggtttttttttttttaagacaaaattttactctcttgcctgggctcaagtgcagtgatgcaatcatagctcactgcagcctcaaactcctgggctcaaacaatcctcccacctcagcctcctaagtagctagatctacaggtgggtgccaacacacctggctaattttttaaatttttttgtaaagacagggtctcgccatggtgtccaggttggtctctgaactcctggcctcaagcaatcctcccacctcagcccccaaagcactgggattgcagttgtgtgccactgtgccaggcattgaatcattcttttgttattgtagtgaaatacacataacggaaaatttgccatttaaatcattttaaaatgtgcaattcactggcgttaaaagtactttcacgatgttttgcaacccgtgccactatctagttccagaaccttttaaccaccccacacggaaaccctgtacccattaagcagtcacttcccattcttcctgcctccagctcctggcaaccacaaatctgctttctgtatctgtggatttgttcatactggacattttatataaatagaatcatgcaacatgtgaccttttgtgactgtcttctttcacttagcatgatgattttaagactcatccatgttgtagcgtgtatcagcacttcattcctctttacgaccgtataacattccagtgtgtggctataccacatgatatccattcatttattgatgggcacgtgagttgtttctgcctttttggatgttgtgaatagtggcattgaatcactttaagttcagttttagcctcttctcagctccccaggtcaatgcacatgagccttgcccctgctaggttaacagttacccatctgtacaatagtaagtacagttacccatctgtacaatggtaggatctatgtatatatgcgtattttacacgtgtatgtatagtctctacaaaagtataccatctgcttctccctaaattgtaagcacaagagaaaaattagataattttgaaattgtttgagacaattctatttaaaactaaagagcagctttcctcaagtgttaaatgcagctgataagatcacccatttctgaaagttgttgagagtattcaatgcgttcattcacacaaggctcagcaatgcctagcacatcagaaacacccagagaaactgcttgtgatcattcctataattatcaccgttgttattattgatgcaacctccactttgccacatcttctctgggtggcaagaagctggaataggtttccaagattccagggctcggccaggtcattagggagccctgttggatagatttggggcacatgttgtccagaggagatttgtgacagggtaaccatggaaactttcctcttctttctgctgcttctttctgaaaataccaagaagtttgtagggtggcagagccagctggaataccacagtgggcaagaggccttctcaagtaacagtcatgagctcaactccgagccctgccactactataatagctgtgagtgaccttgagtgaagtgcctcatctcattcagccccagttttagcatctttaaaatggaaataatagaagcatctgcattttagggttgttgtgaggatcctcagaggtgacgccttggaaatctcccagcggagcctcttgtacaacctaatttccatgaaagtgtccccatcatcatcttcagtgtgcccatttgttgggatagatggtcctcatcatctctgcttgtcctggaaactggagctgtcacatcagcctccccatgtaggaacttgctggctggccacagagcagataggcagctccaaggaggggacattttcctggagcttctacttcccaggggagctgccaagtgaaaagacagttgctggaatggaggccaaatccttcatgtgctggtccaccaggactggagcagggccacccaaggcatttgttatctgctaatgaggctaatcaatggctggagggtggaaagagtggggcttactgctcagcagccagagtcatgccaggcttttccagacaactgtgctgcaagtgtattattttctcacaaatggatgtggcattttacaagtaggtctctgtcacttctgaatgcagaaagtatgtgtgtttaatccacatgctcgtttaagaaaagctctgactctactaattctgctgtgccttttaatgaatctctattctgctagactctgggctataaggaaccatagagacaggtctcctcagagcccccaggctacctcttaggaccacactaactccccaaggtcactttgctttggggaacaagacagaagacaagaaaatagcaagcatgggtgatatggtttggctgtgccccacccaaatctcaccttgaattgtaataatccccatgtgtcaagggtggggccaggtggagataattgaatcatgggggtggtttccctgtggtagtgaataagtctcacaagatctgatggttttataaaggggaattcccctgcacaaactctgttgtttgccgccatgtaagatgtgactttgcgcctccttgccttctgccatgactgtgaggccccccctcaaccatgtggaactgtgagtccattaaacctctttcctttaaaaattactcagtctcagatatgtctttattagcaacgtgagaacagactaatacaatgggaaagttgcaaaccctaagaaaccttacaaagcctgtacttccggcttgaacagggcataaagtataagagccctgggaccaggctgttctaacttgcacattgcagacagtcagctactgaggcagcatctcctcttcccaacactagttgaagaggccattttagaagaaaattacacagattcatttcctcctttaccttgtgagctgcttgaagtcagatgtgctctgacttcttttaagacacagtgaacatatagtaaattgtaaatgttgaccgatccaaagtccctgaaatcagcccatggagactccattctggaagaggagagtgcattgatcaattctaattggaaagtatgggtttgcttaatattaggccttcatgggagtttggaaaaaatacaacagacagtgataaataatattatgtttagtgaaataaggtatctttgagatttcttgtgttttttgaaaatattaaggccaggcgtggtggctcatgcctgtaatcccagcactttgggaggccgaggcgggcggatcacgaggtcaggagatcgacaccatcctggcgaacacggtgaaaccccgtctctactaaaaatacaaaaaaattagccgggcgtggtggcgggtgcctgtattcccagctactcaggaggctgaggcaggagaatggcatgaacctggggggcggagcttgcagggagcggagatcgaccactgcactccagccagggtgacagagcgagactccatctcaaaaaaaaaaaaaaaattatgaaaatgtgtctaatctctgcttcacctttaagcctcacctgaaatgaaattcagattatgcatttatcccttcattctgattcttttattaaggaggtgtcaaaaactttgtctttggaatccaataagtctggttcagatcttaactctgatgcttaaatacctgtatgaccttagaaaatttgctcaacttctttgggtatcagtgttcttaatttttttttttttgaatttaaaagtcaaaataataacagatggcaaggttgtggagaaaagagaatgcttatacactgctggtgggaatataaattagttcagctatgtgaaaagcggtttgacaatttctcacagaaaatcgtaaaacagaatgaccacctgacccagcaatcccattattatttggatatattggtatatacccaaaggaatataaatcattctgccataaagacacatgcatgcatatgatcattgcagcactattcacaatagcaaagatatggaatccacttaaatgtcaatggtagactggataaggaaaatgtagtacatgcacaccatggaatactatgcaggcataaaaaagaacaagatcatatcctttgcagccacatagatggaactggaggccattatgctcagtgaactaatgcaggatagaaaaccaaatgccacatgtcctcacttataagtgggagcgaaacattgagtgcacttggacacaaagaagggaatgacagacactggggcctacctgagggtggaggatcggaggagggagaggagcagaaaggatgattatcgggtattgaacttaatacctgattgatgaaatactctagatactaaatgctcatgacacacaatatacctagataacaagcctgcacatgtacccctgaatctaaaataaaagtttaaacataataatttaaaaacatctctcttcttttctaatataggtgtttagtgccatgaaatttcctgaagtattgctttggctgcatcccacagattttgataccttgtatgttcattttcatctttttttttctcttttgatatctaattgactgatagtttattagggactcttgttatttattttctaaatattttgtgatttttttcacagataattctgtctgttattgatctctgattttattcccttgtggtcaaaacatatattttgtgtaacttaagtcctttaataatttttgagacttgttttatatcttagaatatggtatatcttggtaaatcattccacgtgcccttgaaaacaatgtgtattctgttattttgaatagtgtgtgctaaaaatattaatgaggtcaagtaggtctatactgttattcaagtctaccatgaccttactgattttagtcctacttgtcctatcagttatttagagaatattaaaaccaggccgggcacagtggctcatgcctgaaatcccagcactttgggaggctgaggtgggtggatcacaaagtcaggagatcgagaccgtcctggctaacagggtgaaaccctgtctctactaaaaatacaaaaaattagccaggcttggtggcatgtgcctgtagtcccagctactctagaggctgaggcaggagaatcgcttgaatccgggaggcggaggttgcagtgagccaagatcgcgccactgcactccagcctggccaacagagcgagactccgtctcaagaaaaaaaaaaaacaacaaaaaaaaccactaactattatggatttgtctatttctccctgcagttctcagctttcgtttactgtattctcaagttctgtcattatgtgcagaaatatttaggtgtgttatgttcacttgacaaattgactgctttatcatcataaaaaaaaaagtttagaggatttgacaaaatctccagccaccatgcatggcccacactgtgccttagacagctaaggactcggtgaagagagttcattcatttgttcaacaaacatttattgagtcctttcagtgtgccaagtcatggctgaacacgacctggtcactatctgcaaagagtttatactcaaatgttggagcttacagttttgtggtaattaacacgtcaagtgcagcctttcacaagaatattataatttgagttgggttagtgacccaacagcaaaagaccttatcgctctctgtctacctaccctgcttgatctcactagacattaccagaaacttcacctgaacaaacagggacaacatttggtttttgatgaggtgatgtctggtttttaaaattaagtatcccagataaattgctggtctgtgccagaaaccaaaatacagacatcgccactatttctaagagaactatgtgagctcatcctgtgtcccctggagggtcccccccgacaccgcgtagtcatcatggaagacattagcagcggtacccagggtgatgagcgatattctattaggcattcttctctttttccttgagcgagttttctgcatgtgtggagtttcttttaagcttcagtacacagttcagagggtaataccattaattaaaccaacaaggtaatgtaatgaaaggtaggagcctccacagtatactagatttagccctgattaacagggtggcccccctcacactgcaaagcctcgctccctactatccgaggataaagcctcaattgtaattaaaactagggaagaaatttcactcttctctgcaagtggaaaatgaacagtttaaaagcagaggaccaaaggaatcacttagagaagtcaaagagatatcccaaaaaagccccaaagaggcttgacttataattagcagctaaaagatttccagtcatatttcatcaatttctgtttaagggggaaaaaaactttaagactattttgacaagatagagttttgactgaggttgggggaagctaaaagcgttactttaaaatgtaattatgtgaaacttcaattatcatcctgcctttcaaaagtctctcgattcagcaggcaattagcagacatgaaagagggcgggaggtttgtgcgttggacgatgtgatttcttctcagggacagatgcactcggtgtaatttgctgtttgcaatttccccggaaacgagaggttgtgggaagtggtagtcatttgggctggcaaagaaacctagtcctttttagcaatgtcttttctccctggccgcacccatattcatacctggatgtctacttgtttctcgcttttcaggggacctacgggattctgagggatatttgatatgtcgtgcagatttatatctagaagctcttctcccctgagcatgaactttagttgaaagagctggcacagctcatgagaattccttccttcgttctcatacctggtggggctgcggaattctggccccagccaactggactgagccctgctgagagtttgcaagcgtcattagaggccttttattctgtcctctttctctcctgctgcctgtacacattatacggaattaatgacttctggctgtcaatcaatgacactgttattgaaattcatgagtttagattctgacatatgcactaagtgctaagcatggatgaaaatataaagcttcagccattagctggtaaagctagtcttcctcctaacagcgtgcttttgtagaacacttccctttgcactccagcagaaacaacattgtgtgcacagattcttacaacagcccattgtgttgtttggtgtacctatttcgcagatgagaaagtggaggtccagatgggtccaggtcaagtgccttgcccggggttaccatcccggctgggggtcttagcatctctcatgagcccctacagcagcatcttccagcctctcgtccactttctccaagccacagcctgagtgaaccttctggaatgcaagtttctctgtgtgattctgcttctgaacaccacctcggtggttctctgtggttccagatccagcctcaactccttaccgtggctcctgaggcacctctgtgcctgactctgcctctttcccttgtcttatttcttgatgttgccacgtgcagcctactctccagccacaccaaaatcctcgaagccttttccagacttctcaaggttgttcatgctgcttgcggccctgttccctgcttttcatgcaaaaaaacattccactgatccttaagtgccacttctgggaagccttccagactctgccagggactgtgctcctactgtgtgcccctttagcactctgaagtcgcttaccaggacactcggtaaatatttattacttggtaaatatttattgagcacctactatgttccagccactgttggaggccctgggataaagcagtgaacagacagaccagtagggggaaagacacagtaaccaaataaaactgtagtgcactggggctgctaagggaaatcagagtggctggggggcttgttttgatgggggcatcagggaagccttctcagagcgggaagggtgtgaaggagccagccatgggatgtcagggggccaagcgtctcagcatccaaacagaagaaagagcatgtgcagaggcccatgaggctgcagcctgcttagtgtgcttgagggatgcaaggaggcctctgtagctggggcccagcaagtcgcccaggaggtcaataagagatgagatcagaggggtggctgggccagagagtgcagaggagtgagcccttgcagctggcgagctgggaggcccgaggaggcatgtctgcacaggcctgatacgatctcactcaggacttaaaaggctcgctcctcactcccctcctatcactgttgatttaatctgctttcttcctgctgcgctgtaagctctgtgaaggcaggggctgcgtctggtttgctcaccattgtattcctagggcttagcacagtgcctgccttctgagggtacctaataaatatatgttcaatgactcccagccgagctagtttcccgttagaatccacagcagctgacaaacagagagccagggtattcatgttctgggtagcataacccccgaccgccaaacaaccagctaagtttagagaagctccacacctaggcctgatttgcattgtgcaaggagcacccagttgtgttgaggaggctgttcttgtgtggggttgaggggtaacaggtttattctctgcccatcaggcgtctacttggcatttgggtcacgtgtgaatcacagatgtttccgacggctgatgacagtgtgggcaagatggatatggaactctctctctctctctctctcgtctgtctgaccttctcaccctctctttcccaagaaataggcagcacccatccatccacttgcaaacaaaatcagtgtgttctctgcgttattttctgcctttgcaatgggacatctcagtctccattgctacagaccgggtacagattacacctgatctggtcctggggcagtggatccgggtgcagttctgtgtagcatgcatgcctatggatcctgtgagtttgtttgaaaggacgaccttttgtcggcggagtaatttcagttttagttggcaccctagacaaagcagtctttcaacacacccgcagcatataagcagccaggactttttcaatgagattgcaggaaatttgccaagtcgtttggggcctgtaaattaggccttgtttaaaaatttagataaagcccaatgtgagagagaaatgctttcataacattaaatgtgaattacactgaaaacccctttcaagttaaatggaactgttctctggaagcacagagacatgaaatgcttcaaatgtcaaaagagttttcatttattgtcccaagtaaaagcgaaggcattttatgtggtttaatagttcagatgcacatgtaaatggaattcatctggagaatgccgggccagatacagaatctattttcacaaacctgaatgatttcattttatctttgcagtaaccttacaaggggtgggtcccaccgtccctgtttcagagatgaggaatccagaaagctggacggagacattcatgtcagctgcaatcttgctaccaacacctcttgcttccatcattaacacttaacaaaaccggaagcactgtcacatctttcacattctttttttttttttttttttttatagatggagtcttgctctgttgtccaggctggagtgcagtggcaccatctccactcactgcaacctctgtctcccgggttcaagcaattcacctgcctcagcctcccgagtagctgggactacaggtgcctgccaccacacccagctaatttttgtgtttttactggagacggggtttcaccatgttggccaggctggtcttgaactcctgacctcaggcgatccgcctgtcttagcctcccaaagtgcttggattacaggtgtgagccaccatacccggcctcacattaattcttaaagagatcaattctcatacggtggcagggggaggatggagtgtcttatggataacgagtagtccccaagaaaggtgttggggttggcgtgtgtttatttgttagtgcctgacattgtaagaaacatgtttttctctctccaagagccttttgtgaacatcagtttgccatattcgttgctgtattccagcagcagctcctgtctcagtaggctgttccctttgctcttctactaagtcacttaggaggtgatttgttgcaacgaacagaaacccacgttaaactggttgaaatggtcagggatgctcatgatggaaaacctcgcaggctgcgagcaccccagcacggcccatgcagcaactcgggtgaggtggccacgccctgcctcttctttgctccctccggtttcctctgtccatagcagtcttcctcttctggtccaaagatggctgccacggctccagggctcgttgcttccttgttcacatccactaggtaggagctcactctgtctaatctttgggaaaaaagtactggacttagatctgagggatcagttgggtcgcatgcccacctctgagtcaggcactgaagaagggtgtggtgggagtggagctggggaggcactagggccgggttgttctgctgggttctactcttaaactaaaacctaaggaagctgcacaccctggggctagggctggagaaaacccggcagcctgctggtggatgttgatcatttggctctctgagaagcaaataaagccccacctacccgcccccctgccacgccgcccccaaatgcagcatttgccaattcccatggtgtaaatacatatttctgctagggttgattttcagctacgaatgcaatgtcagtgaacatggcattgggaacagaaacatcattggccctcaggccagtcccccactgtaacactgttcctaaaatctgtgggctctatagagggaataatggctcttcaaacaaatatcagagaaggggaaatgaataaatgcaggcatgctaaaatgagcatccctagggataccccagctcggtcctgatgccgtattcaccctagttcttcatggtccagctttaagccaactgctagtagttgtttcctgtcccttctgtgaaagtgtggatggtggggggaatttaactcttgagctgttgttcaagctggggcctttcagcaaattccttaaccgttgtctgtatactcaactatgaagatggccaggtgaggtggctcatgcctgtaatcccaggaatttgggaggccaaaacgggaggatcacttgagcccaggtgttcaagaccagcctgggcaatatagtgagacctcatctctatgttaattaattttaaaataatattttttaaaagattatagtaatgacctctccaccaaagggccattgtgggagttaaatgagatgctgactggggccatgctttgtaagccataaaatgctgtgtgtatataaatgtaaggcatgtgcattattctctctaatgattcccctaccccaagtggaccacagttcaacagtgtagcctagcagagaagtcatgaactctgaaatcagacaagcctggattcaaacttcaggtctgctgcttttgggctgtgtgactgtggggaagacacgtaacctctctgaagctttgttttctcatcaataaaatgggggtaataatgccttattttgaagggttgttgcaaagattgctataggataaagtcaataagggcacaataaaagtaaaaatcaatatgtttaaaacataatttcataactagtatacgttgattaccccttcatccaagcgtattgatcttctagcagcagcctccagttttgctctggggatccatttttccctgactcttaggctgagaggttcatggaacatcccctaccctgctgcctcatcctgtattcacagttactagttcagagacaggtccatcagcatccaatcagagtgaatccaacagctgctatggaaagctactaggaagtgaccccctctgcgctgggatctaagagattaaaagggcggagctgccacggccatcttggcatcacaaggtagggagcaccaagtatgagccaggaaacagtgaaggctagaataatttgagcctggatcaagcccccatccttggacattttagttacatacacccatacggtctttttctgaggctagggctgggaattaccatcaatcacaaccaaaatcctatctgattcatgacacctggagaaactgagcctcagaaaggtggcacaggtggaaagagatggcactgctggtgagtggtggtgtagagacgcaggccaggccctccagccccgatcctgctacctctcaccccagggcctgctgctaccttgggaggatcacattcaggtgtccagctggtggccccgccacggtacagcagagacatgtgactctagattatgcacgttgcagcttctcgcatcacactgcatgctggagagagggcgggagcacatgagccttcatccttcagctgctgggatttttcccagggaatgaagtgatgaacatccccaggtagctgctcccctcgtgttggcgaggaagctctcgggtgaaatgtacctttgggggttgtgtatctgaagctctgtgttgtttttataccagaagaaagaaaaagcagtgagagacatctggggtcagctctcttaatatcacacaacaaattctggcaagcaccccccagctttgaataaatgttattttgattggatttagaagtttggagaagacaaaatgacacattttcacacttccctgtcaaaccaaagtatgattgccaaactgctaagtttttaaaaagcaggaaagggaacagcttatgtgaaacaccttcattgcaattccaggtttctggggggctttgctgtaattctcattttccccttatcgtgtacaggtacacctcacttactggagctaaggctttctggggtggggacgggcttggagcctcaggggaatgcttacaataattttatcagtcaaaacatgttttgaatgcattaaaggtccttgtttttattttaaagcaaactttgtatgaagcataacatccctttcatggttggtttttaagggaattcaatgggaatccttttgtatagagaagaatccttctgctgtggaaagaattaccctgctgtcaacatgtcaacatcagaaaacgcttctatggtaaaagttagattagtgacatataaataatgaagaatagtctgtgttgagaagagtaagtgcactgaagatttatggtagaagttctaaacttttctgagaacattaaacaagtgcccagcaggagaatcctttcttttgggctttttttttttttttttaattcactcattggaattctactcattttcctgcccacccaaaggctacaggtaatcatctcctttcttccaaatgaacttgcactgttctcagctaggactaacaaaggaaactgagaccgcaagtgtaaacctggcagaaatccgcttgtttgatttcatcccgcaggtaccctctgcagccctaaccttggccacctctgttgatgctcttcttccacactgagccaggtgtggaccgtggcgtgacctgaatacatttgtcaccagtacaggattggaagagtcactgtagacactctcctgtttgggaggaaggacaaaatgcactttatttattttttttttgagacagagtatcactctgtcacccaggctaaagtgcagtggcgccatctcggctcactgcaacttccgcctcccagattcaagcgattcccctgcctcagcctcctgactagctggtattacaggcacctgccatcgtgcctggccaatttttgtattttaagtagatacagggtttcactgtgttggccaggctggtctcgaactcctgacctcaagtgatccacctgcctcggcctcccatagtgctgggattacaggtgtgagccaccgcacccggccaaaatgcacttaatattgtcagatcttctggttattagatactggtaggctcaagtccccaaaactttgtatggcagatgggattgttaaggatcttgagatgtggacccaatgtcatcacaagagttcttgtaagaggaaggcaagagggtccgaatcagagaaggccgtgtgacagcagcagcagaggttagagagatgccattgctagaaggggccttgagccaagaaatgtgtgggtgcctctagaagccgggaaaggcaaggaactggattctcccctagagcttctagaagaaacacagccctgtctgcatcttgattttagcccccaagacccactttccagcttctgacctccagcactgtcagataataaatgtgtgttcctcgaagccgctaagtttgtggtgatttgttgcagcagcctataggaaacttacacagccattcactctgctgagcattagaatgacacacagtcctcgactctcagactcacagaacattatccatcctctctctgaggattcagaagatactgaggctcctacagtgccttggggacatgattatgaaaataagtacccattatattggttaagagagagcctggctcgacacctggtagaaacagcatttgcgcgcgcactctctctctctctctctatatatatatatttatttaaaggctgacaatttggagagagatgaaaaataccacaattgcttacaatagaacctgacaaaatggggttgttctggtgccctggtgcctacctgtgtttgagggtctcaatagcagggtccaacaactgcagagagctggagatcatgttaaatataaatatagggtttgcagagagggacccattcttttccctctctttgcatgcctagttcctattactgtcacaaggagttatgtgtgtgtatctataaggcaatggatgccgtttatcgtaattcagctagtgcacaaaataccacatttacaccatattggcacttgaactattccttccccaagaaccctgtccccacgagtatgtatcaaatacctcccaacttcattttttatcaagcctggccaataaaagctgaaagatcactgaggatttttctcttttgtcttaaaaaattttcatttcataaccgtacacggagaatctgtctttaaaaatggatgatacgttagcaggaggttgtgtaaatatccagttatttacacatacctagctgcatctggaagcctgcagcactgcaaataaggtccatcattgcttctcatttctgatcattcaagagaataacaatacaatagcatggagtagctcagctcttgtcagctgtggggagttctcggccacgttctgtgggtctggacagctcagctgcttcccctacccgttcagtaacatcctgtttatgtggctcctggacaggctggctttgttacttgagttgccttctgagagctcatggtaggctttggagaggctcctgagggtcaaaaggtgctgaccagcagagaagtttcccagggcaggaatgcacagaatgcacagtccgtttttcttctgcaatcagtgaacacctcttcctcagcaggaatccactcaggggtgggtgggttttaggatttgcccttagttattatatgcacgtaaaacatgtctcggaggtaaatggctcaggaattgggctgaaagtgtgactgcacagggtagagctcagctttgccttctaaaggctgaatgcacctggacaagttcccaaacagcaaatgtcattttccccgtccataaaatgatgagggggaagggaatggtacccaccccacaggtgttgcaggaagggcatcagggggttaggttgaatgccaagttgtttgtactggtgcagactaagtattcagtgaacgtgagctttgcgttgctgttaattcaatgaggtggtggaatggattagggaggtgcacagttctgaaatgcggacatccacgctgctgtgccctagcactgggcgttgttgggctagtccttcacctgctctaagtgtcctatttggggtagggaactgtcctgtgcactggcataggggcttatgaacatccctggtctccacccactgggtatcactggcacttgcccgtggatgtgacacccaaaaatgtctccagacattgctgtgtgacagtgcacgggatagtcccctcataccctatgagaggtgcagggaggtccctgtccagtgcctgggtcagtgttgggtgcctcgcggctctaggtccagactggcttctgctgttctacctctgtactaacgcgattacgatgactgctactgctgctgctgttaccaatgatgatgtctcttaggctgccccgagcaattctttccctctgccacgttctctcagggcatcattggagatgcaacaccacctgcacttaagagagctgcgtgcttcaggtatagcgatctgtgtgttgtagctggtctgaaataactagaccagtggttctcaactggggccatttggccacatctggtgctgctgatatccagtgggtggaggccagggaggcccataaacacctaagacagtgcacatgccagccctctacccagcatgccagtggtgccaaggttcagaaaccctgaattccatgctatctcatgacacatcagttctaaacacattgactggttttaccccattggcagtttctgtttacacccaggtctgtgggcatatggaaaatcacggctgttgagtaaaggatggagtaaaaatatactctactcccctcctccacacttcaacaccaacctcaatgaaacaattccaactgaaagcggggaggactgggaaaagagttgaagagagggtgtcagtagagcccaggcttggccaccagaacaactgggtttggttccaacccttaatgcttatgagatggggtgatttggggcaaggcacctccgtctcttggcttcagtttcctcatctgtcaagtgagggggtggggctagatgtaaattaccattctgctctgaaattcctaattgtaactttgaaatcaaactcagtggtccccctctctaggtgctggtggagaataacttggattctgtgacctctagatggagagagtgttgtctgacccccagctcagaggaaggtgagatagacagacatgcttgagccctttggatagagggctctttgtgttcatcgagcatttctgcctctcctatgtcgcttaaaactgtgttaattatgacagtgacagcagcggctgacacggaacactcactgggtcccagcactgctctggacacatctcacctgtgtggcatcatttgattcacccctcagtctcttgaaatagggaccgtcatttcctccacctgacagggaaactgaggcagcctgatgcatgaggccacaaaagaagtgagagacgctcgctccaagttgcaaggaggcgagttctttcctcagcagatcccagccctggctttacggctaatcatgagcaaggggaatctaaacagcatggtaatttgatttttgaatgaagctaatttgtgagataccatcctccttaggaggggagaaataagaccaaagggaatcaaaagaggaaataaccaaagtgatcttaccctcctgctccaaatgcaagctgatgtgttggaggggaaattcgacctgaagttcagacatgtcacagccaaaggaaaccttaaaagctataatttccaaggagacctctggagggctggacatggttacccaggaatctgagctgacagtttatgcaggctgcccagagagcccagggccccttttctgactttctcattcctgtggttggccgttgcatattctctccctccataccttgggtgtgtaatgggaggtgcgcagtgaaaatggagccagaaaaacgcgtgcagcagctcatcagaaagtgtaaggggtgatgtaaatgggaatgatgggcagaggcacactgttgacatcatggtattcaaaggaatacaataatatttgtgttcactttactgagagccttctagatgccgggcactgagctgagttctttgcttacattaacttatttcagtgccacagcaattctgggggccgggagggggcaggtaggattatcatccccattccacagatgaggaaaactgaggctcggaaaggtcacatgacttgccaagggcacacagtggagaagggtggggacaaaggtggcttgactaaagatcctatccttttgatcaccaccctcctcagataatctcttctcaaggctggccctctgtagagtcgtctggttccagctaccaaagattctggtttaattactcctggatgaagtgggagtgtgtgtgtgggggcgggtgttatttttaaagttcctttggtgattgtatggggagtgagggttaagaaccactgtcctgcataaatatatgtgtgtgtgctcttgtggggacctaaaaaaagaaaaaaaatatgtatagatgtacatatatatgtgtgtgtgcatattttatcattttatcagtttctgagggctactgtgacaaagtgctacaaactgggaggcttcaaacaacacagatttattctctcacagtccaggaggccagaaatccaaaatcaaggtgccagcagggttggctcattctgggaggtctgggggagagactatcccacacctctctccccgtctctggcagctgccagcattccttggcgtccttggctcacactctcatcactctagtccctgtctctgtctttacctggcgctctcccctatgtgtcttcgtctccgtgtgtcctctcctcttctcacagggacaccagtcattagaccagggcccaccctcatccaggatggcctcgtctcaacgaatcacctctgcaaagaccctgtttccaaatacgtccacattctgaggttccctgtagacatgaatttgggggggacaccattcaacccacaacgtgtgtgcacgtgcgcaaaaaataactggggtggtggggcgtggtgactcttgcctgtaatcccagcactttgggaggccgaggcgggcggatcacctgaggtcagaagcttgagaccagtctggccagcatggtgaaaccccgtctctactaaaaatacaaaaattagctgggtgtgatggctcatgcctgtaatcccagctactcgggaggctgaggtaggagaacggcttgaacctgggaggcggaggttgcagcgagctgagattgcaccacggcactccagcctgggcaacagagcaagactccgtctcaaaaaaaaaacaaaaaaaaaaaaacaaaaagggttgtcctgttgagaactctaaggggaagaccctgcccgcagtgggaaatgaccgtgtatgtttgtgcaggcagcagggagatgggcctctctgaaggatgggattgagtgtgccgctagaacgggtcttgcctccttccgcttctccatcttcaccgccactctcccaatctaggccgccatcaattgtctcctggacagacagcagcacctcccctctgatctccttgcttcttgccttccacactctgcagtcccccatcccacccatttccacccagctaatcctcagccggcagcccatcttctaaatcagtgacctgtgcttgttacttctcagctcaacacccttcagtggctccctgttgtcctccaacccttcctcagtttacctctctggcatcatctagtgctaccttccaccatacacaatgggctgcagccatcctgaagttgcctcagtccctgaaacgcatctttcatgtcttttcttccgtgcacccttggtgtggctccacctgccagaaaggctggacagacaccaccccaaatccatggaccccagaggctgatgcactcggtcagggctctgggcccaagagagtccagcagacagaagccagagtgagaaggggagacctcccatttggacctcccatttaaaccttgaacagggcagggaaatctgtcaatatccccactgagagtccccagccctctccaagcgggaaacgaattgaccagctgtaaaaatgcgatgcagaatacaaaccagcttaatggttttctgagacattaaaaattaatgttgaacatcaacactttgagtggtcaaatgtcccctgtggtgctgaatgtctggaaattgtccccatagggcacagtggggaccatggccatagacctgtttgaggcagtataaatgccctatggagtagaggccatttgtagggtgagccgggcttagaaggttcacgggagaggccgagtggcttcctccccttctcagtcctctgacctttgttctcacaagctgtttgtaaacttcagcaatttttttttttaccatctctactgtttctcctcccctaattccataggcaacacctaggatagacttgtagatggactgcagttgatcaatcctcgtggctactgaacactcagacccatctcttttgatttttttagccatccagggcatggaagggaggtgcacacccgctgtggccaccagctgctgcctgcagggctcctcgtctccatcgagcagctgtgaacctcgccgactcccaggatttgtaatccccactttcccgtacctaagaggtcagagaaggtggtgtgcagccacagttgaggacttctccctgcggcatgatggtggctcagcaacgctaggtggttgtggagagggaggaccatgggcacagcttggaaactggaaatccacaaaaggttgttcgagaaatgctctgggtttgttgggcctgaaacagcaatatttttaaaaaccccatctgctgctcaactaagtttaaaaatacccctttatattttagataataaagctcaaaattattcactatattagatactgcttaataaaatcatggcctaatgagctgcctaatttgtgtgtgccaggtttcaaccgtctgggacctgctggaatatgctctgatactattgattccattgcaggtggaataagcctccattctgttgccatggaggaggcaagaagttgaattttcatcactccatatagggcctctaacatgttcctgtcttttcatgattgcacagggtccagggcagcctgtggtcccagggcagtgggtattcaggtccctaactgtagccattagcaggggacaggcattggagagattggctatacttggtttctatcctgggtttccagtgtcacctccctccatgcttagtaacttcctgtcttagttctttccagaagtactcatccagcactctgcagggtccttagcaagaacccagagagctgcaacttggtagggatcccaccctttccttgcaaagcacaatccaaactagaaggtgcaacctgggctctagctactcctccctggcagtcagcctgcccctgggactttgcacatgccatttgttctgcctggataactctttgccttcactgtccatcccctcacctctgacccctttagcagcttaactcctcttcttgcttcaggtctcagattcagcgcctctctgtttggaaaggcttgctgacctcccacgtccctgatcagagtctcttgcacttccaccagcacatccctgtgcacctcttggctctgctcttctttgagctggctgtattcttgggcaggccctttcttcagtggcaaaatgactgctggtaaccatgaatgcgtatccccagatgaaccacagggcatcattcccaacagtcccagcagaagtcctgggtcattcatttgcagaacattgaagcaattccactgtaaatctgattggtcaggctgggtcatggagctaagaagtagagtcagcctctctcaaaccatatgattttatcccagcaatatagggaggtgggaataccaggatcaggaggaatattttgatgttatcaaaataaggaggtagactggccaggcaaaagcctcagatgatcagtttagctcccatggtctacatgacacctagatgagtttcatgagatatccctgcatccagttggtctagatttggcccaggatgatggaaaataaaaaataacagtagtctaagtaaaatggaagtttcttattcttcccctaaaagccagtagcaggccatgcaggattggcatgaggctcggctccacaagccctcaagcacacgatgacttccgtctccccaccagaccatgcctgcggtgtggcctgcatctctgtgcctcaaggtggtgctccagctgtcaccaccccacccccaaaaacaaaatggaagagactagaagaagcagccagggaaagtctaccaaccaaaatttcaggaggatttctggaacacaacaccctgttcagtctattgaccagaaaacttggtcacataccacccttcgttacgagaaaggcgaggtgtggccatgagccacttgaaagttccattacacttggacacgacaccaaaagcacaactcatgaccaacaacatttattaaattggacttcatcaaaattaaaaacttcttctctgcaagaaacactggtaagagaatgaagcaacaagctacaaactggggagaaatatttgcaagtcacgtacgtgacataggatatgtatccagaatatataaagaattctcaaactcagacatcaagaagacaagtccattttaaaaattggcaaaagacatgaactcaagaggatactttgcagaagaggatatatggatgacaaagaagctcgaaaagatgcccaacatcattagctatgagggaaatgcaaattaaaaccacagtgaggccaggcatggtggcttaagcctgtaatcccagcactttgggaggccaaggcgggcagatgacaagctcgggagatcgagaccatcctggctaacacggtgaaaccccgtctctactaaaaatacaaaaaaattagccaggcgtggtggcgcgtgcctgtagtcccacctacttggcaggctgaggcaggagaattgcttgaacccgggaggcggaggttgcagtgagctgagatcacgccactgcactccagcctgggtgacagagtgagactccatctcaaaaaataaataaataaataaataaccatagtgagataccaacacccatcaagttaacacggcatgtgctcactcatgtgtggaagctttaaaaagctgatctcatagaagtaaaaagtggaacagaggatactggaggctggaggggttggggaaagggatagatagggagagatgtgttaaaggatacaggtaaataggagaaataagttctagtgttctatgccactgtaggataactatagtttacaataatatatgatacagtttcaaatagctagaaggaagatattgaatgttcccaagacaaagaaacgataaatatttgagatgattgatatgctaattattctgatctgatacattatatgtataaaaataccactgtatcccctgaaaaagaacgattattgtcagtttaaaaacaaaaatataagggtttaaaaaaaatggcctaaatgaaaaagacagacaatactaagtgctgatgaggatacagagctactggatcttttataggaacataaattggtgcagccactctggaagagatttggcactgtcttataaagtgaaacatctatccaccatgtgactcagcagctgcattcccgggtacataaacccctgtgttcacacaacaacctgtatgttgtgaatgtttttagcagctctgtgcataataaccccaaactggaaacaacccaaacattcttcagcaaatgaacagatgaaccatgactccacaataaaaaggaatggattttttttaacttttattttaggttcagaggtacatgtgaaggtttggtatataggtaaacttgtgtcacaacgagggggagttgccttacaggttatttcatcacctcggtattaagcccacccaatagttatcctttctgctcctctccctcctcccaccctccaccttcaagtagaccccattgtctgtttttcccttctttgtgtctatgtgttcttatcatttagccctgacttataagtgagaacatgtggtattcagtttcctgttcctgcattagtttgctaaggataatggcctccagctctatctatgttcctgcaaaagacatgatctcgttttttatggctgcatagtattccatgatgtttatgtaccacattttctttatccagtctgtcaatgatgggcatttagtttgattccatgtcttttgctattgtgaatagttctgcagtgaacatttgcgtgcatgtatctttatggtagaatgatttatattcctctgggtatatacccagtaggattgctgggttgaacagtagttctacttttagctctctgaggaattgacataccactttccacaatggttgaactaattttacactctcaacagcagtgtataagagttcccttttctctgcaacctcatcagcatctgttatatttttactttttaataaatagccattctgaccagtatgagatggtatctcattaagattttaatttgcatttctctaatgctcagtgatattgagcttttttttcatattcttcttggccacatgtgtgtcttcttttgaaaaatgtctattcatgtcctttgcccactttttttttttttttttttttttttgagatggagttttgctctttgttgccctggctggagtgcagtggcgcaatctccgctcactgcaacctccacctctcgggttcaagcaattctcccatctcagcctcccaagtagctgggattacaggtgcccaccaccacgcccagctactttttgtatttttattagagatggggtttcaccatgttggccaggctggtcttgaactcctgacctgaggtgatccacctgcctcagcctcccaaaatgctgggattacaggcatgagccaccacgcccgcctgcccactttttaatagaattgtctgtttttctcttgtaaatttgtttttttttttttcttctttttttgagactgagtctcgctctgtcacccaggctggagtgctgtggtgtgatctcggctcactgcaagctccgcctaccaggttcacgccatgctcctgcctcagcctcccgagtagctgggactacaggcgcctgccaccacacccagctaattttttgtatttttagtagagacggggtttcaccatgttagctaggatggtcttgatctcctgagctcgtgatccgcctgccttggcctcccaaagtgctgggattacaagtgtgagccaccgtgccgggccttctcttgtaaatttgtttaagttccttatagatgctggacattagacctttatcagatgcatggtttgcaaatattttctcccattctataggttgtctgtttaccctgttgatagtttcttttgctgtgcagaagctctttaattaaatcccatttgtcaatttttgcttttgttgtgattgcttttggtgtctttgtcgtgaaatcgttgcctgttcttttgtctagaatggtgttgcctaagttgtctttcaggatttttatagttgtggattttacatgtaagtctttaatctgtcttcagttaatttgtgtatatggtgtaaggaaggggtccaatttcaatcttctgcatatagtcatatgccagttaccccagcaccatttattgaatcgggagtcttttccccattacttttgttagttttgttgaagattgggtggtcttgggtgtgcagccttatttctgggctctctattctgttccattggtctgtgtacctgtttttgtaccagtaccatgctgttttggttactgtagccttgtagtatagtttgaagtcaggtaacatgatgcctccagctttgttctttttgcttgaagttgccttggctatttgggttcttttttggttccatatgaattctaaaatagttttttctagttctatgaagaatgttggtggtagtttgataggaacagcattgaatctgtaaattgctttgggcagtatggacattttaatgatattaactcttcctatccataaacaggggatagttttccattagttgtgtcttctctgatttctttgagcagtgttttgtaattctcattctagagatctgtcacctccctggccttcctgatttggctcttgccttggctattgttggtgtatatgaatgctagtaatttttgtacattgattttgtatcctgaaactttgctgaagttgtttatcaactgaaggaacttttgggccaagactatggtgttttctagatacagaatcatgtcgtctgccaacaggggtagtttgacttcctctcttcctatttggatgccctttatttctttctcttgcccgattgctttggctaggacttccaatactacgttgagtaggagtggtgagagagggcatccttgtcttgtgccagttttcaaggggaatgcttccagcttttgccctctcagtatgatgttggctgtggatttgtcatagatggctcttattattttgaggtatgttcaaaaggagtggattattgatacatgaaacaatgtggctgaatctcaaaagcattatgctgagagaaagaaacagtcccaaaaggtcacatagtctgtggttccatgtatatggcattcttaataagacaaaactccagttgataagaaaagatcactagagggtaggggttggggtggggagtgggggttctggctataaagggacagtccagggagtgctttgggtgatagaccccggccatatcctgactgagtgcaggttacgtgaatctatacattgttaaattcatggatttatacatctcaaaaaacatcagctttaccataaaaagctctgttcctaggctgggtatcgtggctcatgcctgtaatcccaatactttgggaggctgaggcaggaggatcacttgagtctaggaggtcaaagctgcagttgagccatggttgtgccactgccctctagcctgggcaacagaacaagactgtctcaaaaacagaacaaaacaaataaatgattactatggcagaaaagaagcatggtgatagtgagggaagctgggggtaactggataatcatctgtacctcatttaccaaggtatcccctttgttgggctatggcagggtttctcaaaccctggcactgctgacatttgcagctggatgattctctattgtggggctgtcctatgccttgtagggggcttatagcatccctggcctctacccaccagatgtcagcagtgtcccccagcctgcagttatgagaaacaaaaatgtctccagacatggctccatgtccataggaacaaggcgtcactggttgagaatcactggctagtctgagtatgtttcaattatttacaactaaataatttcccattagttgtttcctttctcagagacccctttgctttctgtctctctcccttgcctctttgtgacaactgccaaagaattagcacggtgtaagctgagatgcctgaggacagggttccccagggcatgtgagcctgtgcaaaggagcttctgctccagcacgtggatgggggaagcccttaccttctccatatcctctctccacacccatgttaccccatactcatgacttggcagaggaagaccgagtccaggcagttattggttccaacaataggccgacattttacttacatcttaaaccctgggtatttcccttggctcattttagagctcagaaaagccattccactatttaaatatggaagagtaacatattttaataatcataccccggggcgcagtttttccgttgcatgaaaatataatggtcaaaacagcccgcagccaattgcagaattatgtaaaagtaatgaaaagaaatcaaaacccacacgccttccatcacgctagaccacctttgctgtcttgctaaattttctgcttcacacactttctagcccaggataaagattgtggagtagttcatatctttatttctaaagagctttgcctattccaaaggtgttttaggaggctgagttacagaaggaccagtcaattgttacagaaggaccagtagtggagtttcctggatcatcttaacatcaggggaagatcaggggttactttaggacagagggttgcagactctgggctggtaagtaaatgatagaacaggctgcagtcaggtagagagcctgggcccactctggagactgaagtgccttctgtcatctacataattgttaccgtgtgggaatcggggcctggtattggcaaattttatgttttcaatgcaactcttaaccggaatctttatttgaccccttctactttgtaaatgctgcaataaattcagactgaaaagaacaaatctgtaatctaggtatattctggggttcaccaatttgtgatttctcccgcaccttaaccccctaaaggtcaactctgcaggaacgagatggttggacctagagagggaatcttaacagaaagggtggtgtgatcattctccattcgtttcctgtctcttcctgatctgccaaggtccttcccagctgacctttctgtttcctctgttgcccaactatcccagccaaggtcagggtcattcccttctctccactgttgaactaagttaagaaggaacttttccttaggaactttttcagtttaactctcatcacagaagcacagaaaatatgcttaagccaaaaagcccaagtaaagaaagcagggtaggaaggttgtctggacagaatgatcacatttatgtaaagatcgcaaccaagaaattgcacacaaaattacagggagaagggaacacagcaaactattgacagtgattaactctgggcatgggaatagagactgtttatccccatcaactttcttgtatgtttcatgctgggaatgtgctattattaatttataatggaacacattttttaaaggaaatcttacttggaaactaaatgagaaacatttgaaaacagaatgttcaatagtgacatttagtgagcatcgattctttgatcaataaccacaagtgtttttttttaacttatgcaatggtaggacatctgattttagctgatctaaaggaaaaaacagacttgtcccctcctctctgtcccttagatgagattgttggcaggaaaactagagctgcagagaggctgggcttgacgtttctccttggagttgtaataaggagggattggaacttggacacttgacttaggagcaacttccaagttgaccattagacacaaggatagaacctttgcttcaaggggtggttccttccgtgaatacttaaaggagttagagattgggagtccctgctgtaaaagtggaaaaataatagtgctcactaatgtagtttgtgtgttttgggtcatgtcccattgggaaccagcccctcccctgggtgagctgcaaatggctatggtcactggagtctttggggcatgagacgttctgccctaggttagacaactgcatttacatcttcacattaaatataggcagtttggtgcacccagttcttttaagctggcagcaaaggaatttgaatgaactcatcagctctgtccacatatttggattttacaggatgatttcccaaaccacttggaacaatgaagtgtgccctgatttgtttgccactggatctcagcatggaagaccagagactggttggttgccctggtgcaggcaccacattaatgccctggtggtggccaggccctgaattttttagctgagtaaagatttgttctcttcccaaggattgatggctaaggagctctgattcacatccttccagaaggccgaatccacataccattgatagagaacttgctttatgccaggactatttgttgacttatattttagggttgagggaggcactattgttgtttgcattttactgatggggaattaagcacagagaggttaagtgacttgtggatcgtcacacagcaggtaaccagtagaggtgaagttttaacccaggcagtgttctccagagtcgttggtcttgggaaaatggctaacggttcacgttacacctcaaagcctgattgatccattgtcataggccacgttcacattttactcattacagtgaccaaggatgtatataaacacatgcagccgaaagaaggtctgagggtttgcctgctggtacatttccagacacacagctttaagcagtatctgctttgaaacagaccaaatgtcaaggcgaccaacaaagcctgtcaattaggaatgcctcccagtgtgtggtttagagctcagagttaggggaaaaaatgcagcgtgaactgtgataagctgagatggagagaaaaaccagaaacctcactccaacatcatcttattttaataattatcatgatcccattaatccaagaatatttggtacctaattattttttatttatactttgtaatgtagtgtgcgttggtggaatgacattagagggaagaaagtaaaggttagggagacaccatttatagaaaagccaggtacagggcttggcacctaaattctacctcatttagtcttcttaactgtcctgtgacagtgggtgctggtatctttccccctccacccatcttttttttttttttttttttttttttgctgataaggaaactaaagcccagagaagtttagtaattttcccatagtcacacagcaagtaattgacagaagttactgtatttatgggtgtgggtatgtggaaggaagtaggccagcaggttttgtgggccatgctcagtcatataaaattatgtcaaatacatattaaaaatttacaagaaacattaaaccaaatacatattaaagacttacggctgggcaccatgactcacacctgtaatcccagcactttggcaacccaagctggaaggattgcttgagcccaggaattcaagaccagcctggacaatatagcaagacctcacctctactaaaaattaaaaaattagccaggcagttgtcccagctactcaggagactgaggcaggaggatggcctgggcccaggagttgaacctgcagtgagccatgttcgtgccactgcactccacactccagcctgggggatagagtgaaaccctgtctcaaaaacaaacagataaacaaaaaagacacaatgggaccaagagccaacagaagggttttctgatactgtatatgagaatgtagatctactttcagtatcttttgactaagaaaaatccaactaacatggaggctatgataattcaatattgctttacataaatctgcattttattagtcagcaggttcctgatgcattgaaaaccatgcacatgtttctattgcatttagaaacactacctataggtagggtagtgcttggtgcttttctgggtttctggaccatgtaattaacaccaagggcctgatggggtccatggctccccaggttggaagcaagtggtttaggaaatcaaggagaaaacaaattgaatactgactttcccaaatgctacccatgcatatagagcaagaaagtgtggtagagggagaggagaacctacctccgcagtgactttcctaaaactccatgaatctcaagaattcggagaaagtcactcaagctcattcaacacatattcaacccaagagcatcattaagataaaatcgtttgctctctaaatgaccaaattaggcattgcaattagagcacaaacacttcctggtaattcctcatctcattttcaacttgccatgcttggctctgtgagcctttgagagaaagaagccattgttgaaaatggaatgtgattttcactagctccagtgtttaggagaaatatttagacttattttgatggcaggaagtcatatagccttctccattctgaggatggaggggtgagtgggggatctctatacctgtgagtttcttgtcagtttgcctgtaatgattggggaggttttctttaactttgacatctgtcttccctggtatttagcagggatcagaggaatagtggataatatgtgagaggtcaccctgtctcctcttaacttttcctaccaggttggggaggttatttgtgaatcattagaggtcagagtttagccccatagtggaccctggaactacgaatgtttctacaagcaggaatcacctggtacaaaaccattgactcagtcttgagggtttcattctatggaagcattgttgaaaagaacaacatttgactggatttattttccaaaattttgactggggcttttttccccccacgagaataactgcagggtctaagatgaaccgtgtgagctctagcattagaagaaaagacaaagcataatgtagctcatgaagtttttatggctggttaatgcgtcttagtctgctgtgattaaatggccaatgtggctcaatctggaagcttcctactcgccttctaacttcttcacataatagacaggtagttcgaatgatacccatgatcccacacaatccttttgggatggaaatagtccctgtaaggggaaaatcattgagcagtttgtagtttttcaaattttaccttcttttgctttaaattaattcctacagaacaggacattttggtactgaaatgaggtctgtacagggcagatcaccaggccatatgtgagggccaccttcaggaatgaaaaatcaaaaacaaaacaagctaagcagcagaagacaaattctgttcaggacactgcatctttatgtttgcaaggacttagcccaggcatgtaattttgatcctgttataaatctgtgacaagtgctcttcactttaaacaactggaggcatccctgaaaagttgtgtgatatttttacccaatttgctttcatttaaaattgccatttcagagtcatcatattatcttcattcttcattatttttcacttgactgcagcttggaattttttctaccttcttcctcctcctgtttctctgtctcagcatcatatatttatgtgttggttcattcgaccacccacccacccatctgcctatccatccacccacccacccgcccatccacctatccacctatctacctatccacccacccatgtacctatctactctcccccatccacctattcacccatccacccacccactcatccacctatctactcacccacccatccactcatgcacccactcatccacccatccacccacccatccatccacccatccacccacccacccacccatccatccacccacccatccatctacctatccatgcacccattcattcatccacccatccgttaatccatccatccattcatccacccatccacgcatccagaaaacatttcatgcttatgtgccaggccatacacaccagtttaatgattttcaagttggggagattttgctaccccgcccccatggcaattggggacatttttggttgtcacagctgggagagaggggggtgccactggcatctggcaggtggagtccaaggatgctgctactcatactgcagtgcccaagaaagctggcctaaatgtaatatgtcaagctggagaaattctgctgactccgggataaataactgagttcctgaccatatgaaacttaccgtcttgcaggggaagtggacagataaacagggagattgtgctgatgctgctgttgaggtcataggtgtttgtggtcatttctcctttggagggtggttcagaaacaagtccattcatggatctgtgaaaaaattcttctctggagaggtccagtaggaattggaaagtgagggaaagaggctggatgaacaaagggtcacaggtgtaggtttgggacacattgtggggcctgaaatttggaaccttaaatgaggcagaggtaataagctcagatgcctgcaggtgccaggtatggtggcaagggtagcaataagtggcagttgatccagctccctggggcgtgttggggcccgtgggagacaatggggtccctgaaggaggcagtggccacccagccccagtcagctggctccatctgagaatgtaggcccggggcggccagaccggtctcagttttccataaaagctggaagcccggactttgtaggaaatctcctgagttttaaatgtgtataactcatcccagatttgtttaaaaggatgaaaaacaaaaaacactgttcaagccaaacaaaacacacccgtaggccacatccctcggggttttgacctctgttctcaggataaaatgagtcaaggcttgtaataccaacatggtgcctgggagacagtaggcattcaataaatattggttaagagtgaataaaggttaagtcaaaatctggcaataaaccctgaagagcacctaagggttctctaaaatgaatactttacctaaatcaggctttctcaactgcagtgctattggcactggggccagatacttctctgttgcgtggggctgccctgcacactgtagcatgtttagcagtatccctggcctccgcctaccagatgccagtggcattccctttcctctccccacaattataacaaccaaaaatatctccaggccaggcacgatggctcacgcctgtcatcctaacactctgggaggccaaggcgggcgtatcgcctgagttcaagagttcaagaccagcctggccaacatggtgaaacccctgtctctaccaaaaatacaaaaattctctgggtgcggtggcaggtgcctgcaatcccagctactcaggaggcggaggcagaaaaatcgcttgaatccaggcggtggaggttgcagtgagccgggatcgtgccattgcactccagcctgggcaacaagagtgaggcttcgtctcaaaaaaaaaaaaaaaaaaaaatctccagatattgccagcaatgtacttgaacagcaagttacaggttaactcaatgccatgaggagtttgctgtagtctgttggtggacagtcagccgcaggtagagaacccagaaagaggtccctaaatccccccgctgcctctcatgctctgctgtatcagtcctggggaggaaccaggaggagaggagtttcatgcaaaatagcccccgctttaagactcactcacctaaatttacctgtctccttcccaccccagcctcccacatttccaggtcacactgtgagcctcctctgcagtggaaaacaggtatgttcaccccaggatgggcatccacctcctcctccctggacagagatcactttgtggctgcttttgaggcctttgggatttcgtcttgggcctggttgcttctttggttaatgtttacagaagtactgtgcaagactggacatgctggcagcttctcacacctccagcccacctgttggaaaagggctggaggaatagtcccctcctctccagggatgccagcctggcccatgtgtccacaggtacaaggaggacactctcacccaggtcttggatggaatcagtaattaaagcaactgggggattctggagcagctgttcattttgttgaacaagagtagctggggggcccactgacccaggcaagtggttctcaaacttgagtgagcccgagaacctcctggagagcctgttaagctgttgggcccagccccagagttactgactcagaaggtctgggccaggggtctgaggatttatgtgttccgtggtgctgctgctcctggcctaggggctgcactttgtgaacactcatctggcctctggtgaacactcatctggcctctggtgaagactccaacccccttcctctatccattttctccccaaggcagagaaaggaggatgggaggctagggggtgtttaggaacccacctcctctgctctttctggattctctacctgtccaccaacagaccacagcaaagtcccatggcattgggttacattgtaacttgctctgcaagtatgaggctggtccgataaatttatatccctaccagcttcttcttttcataattatctttcttgtccctttgataatgtggtgcattcaggtgggtctccgggtcattacagtgaattagtgaaatccctctttatgggtttctgtttgttggagcttaacggaggtggtttaaatcaccagccgtcagaattgccttctccagcaagtgcttggataatgcttcattataagcaggcttagctgctgcgacagatatagattagaacaatttgcttctctgctgatggggaaactgtgacatgacattttggtggctgtggtacagagctgttttccagaaaggaaaagcctctcgaacttttgcatctaccgaataattcagctgtgtatgcttacatgctgctacgggtctaggggtgggaagtgtgccgaacccctgtcgactccagtggggatggcaccaggttcaagcggccaaagaagggacccagagccagcaaatgagacacagggttttactgggggcttacatacagtggagagagcccagcagtggtgtgctgggcaggggagccgcaacaacttgctgaaggcgtgcagcttatacagcgttttcacttggcaccctccccttaacaacctctgcctggcaaccttcattcaacccacacttgggacctccatcccctgtatagcctgtgttccatgggacaggatgggggctcagatgttcctcagagacaaggaatgaatctctgggatgaccactcccagattccctagctcaggacacacgttcaggcgcatctgccatacaaggtcattctcggggtaggcttaaggtattgctgtcagatgcatttgccatcagggagggagctgctctctcagagtcggatgacccacttatcccaatttgcttgggacttttctggtttcagcagtgacagtttccggtcccagaagccttagttccacctaacccagacagtggggtcagcctagctcagaggaggatgctggctggaaaccccaggcaggcagagctcagaagtctcaagataccaacaattgccacccagttttgagtacttacgtgccagatgctcaatcctcatgtctcacattgtattagtccgttcttgcattgctatcaagaactacctgagactgggtcatttctaaagaaaagaggtttaattgactcacagttctgcaggccctacagtaagcacggctggggaagcctcaggaaacttacagtcatggcagaaggcaaaggggaagcaggcacagtcttacatggccggagaaggaggaagagagccaaggggacggcgctacgcgcttttaaaccaccagatctcgtgagagctcactcactatcacgagaacagcaagggggaaattcatccccatgatccaagcacctgcccaccaggcctgtcttccaacactggagattacaattcaacaggagattcgggcagagacacaaattcaaaccatatcgcatatcatccttcaaacaatgcaaaatcgtgctattatcaccattttacaggccaggaaactgaagttggcggagattcctctagctggcagaatgattctggccactacacagtcaggccaccaacctagggctgtcttcttcaaagcccatggttttagggagcacctcctagggtggggtgaagagagaggcttttttttttttttttttttttgagacagagtttcactcttgttgcccaggctggagtgcaatggtgcaatctcggctcactgcaacctccgcctcctgggttcaagtgattctcctgcctcaggctccccgagtagctgggattacagacatgtgccaccacacctggctaatcttgtatttttagtagagacggggtttctccatgttggtcaggctggtctcgaactcccgacctcaggtgatctgcctgcctcggcctcccagagtgctgggattataggcgtgagccaccatgcctggctgggagaggcttcttaaaatgcagattggtggacctagagcttctgctacaatatatcaggggtaagctccaagaatttgcatttctcacaagtttccaggtgatgctgatgctagtggcccagggaccacactttggggacacttaagtactaccccacttgggctgtgtgagttgccgcctttgccgcactgaggacctgaagtttaggaggcatctccctatcatgagcattcctaaagggtgggatttgtgcagtcctgtcatgaagactgggggctcttgggctgtgtcttgggcccaggaccagacatgagttaagctccttgagacagggacaagtccttcttgattccaggtgaaccttccccatccccccagagcacagcctggaacccagtaggctctcagcagaaattgtggaatgaatgaaattctccctgtctcctgctcctagtgtttgtttgtttgttttttgttagtctcctgctcctagttttttgttttattttgttttgtttttttagttagcccaagacaaagctggattcttgctcaggtgacactcatgccacgtgaagtggtctatcttgagaccaaggcgtggagtccataggcacatggcagtgcaggcacctggcgctggtgtcccagaccctggaaaagtcagtgtccttaggcaaagcaattgcacctggagtcttgtagcgacctgtgtgcagtagggctggggaagccttgagaggatctggaagggggaatttccaaagcacttgttaggagtggaatcacagcatttataaaaccccgacagagctggagcgggacctgccacatcttagctctgtgaccttgggtgagttttttcaaattctcagtgcctagtgaagatcataactaggagggacctgggatacagatgatacagaaattgtgtttgggacatagtaagcactaaataaatgtgagctgatatttttatgtatcatcattattattcactgtttcaccaactctgagcctcagttcctctatctgtgaatgggagtaaaattccttccctgtaggaaggggcagttatgtgaaccaatgtgtgcaaagtattgtgcacagagcctgggtcctagaaagtcctcgaaaaatgtcagctggcctcagtacctataacctttctacatcaaagtcttttgagaatctgataaaaactgtggacttggaaaatatatgtatatatatatatgacaacattttccactttgggacagggagtttggctctctaagccatctcttgaatcagatttagaatctctgcagtggaagggaactcacttaggctagtgtccactggtgagttctctgcatccccacattccctcgccccaccctagactcccctacatgtgaagcctccagtgtcttcactaccaggtttctccactgcgtgctgctttagggcactcccagcaggatgcagtttactgtaattcacacaggaatgtttaagagactggcaagagcttccactttcacctgctttcacgttatttatgttttaaaagaggctgccagggctgggagcaatgaatggctcacgcctgtaatctcagcacttcaagaggccgaggtgggaggatcacatgaggccacagttcgagaccagcctggccaacatggtgaaaccccatctctactgaaaatacaaaaattacctgggcatggcggtgcacatctgtgatcccagctacttgggaggctgaagcacaagaattgcttgaaccccgttgtagtgagccaagatcctgccactgcactccagcctgtgtgacagatcaagactcttgtcttaaaataaaataaaataaaaataataaataaataaataaaagagactgccaggaaaggacagaatctagccaaaggaatgtattacaaatggtggaattagagatagttctataggtcactcaggcgaggagatggccttttaaccttaatgaaatctaggacactctggggttttatgggggagtcacatggggggaagtattgggaagataagggaataaaaatcatcacttacctagcctctctgctcacctttaagtccaaagagttccttttcctttgctatctccgtaggcagcactttatgttgtgttttttataatcagaggaaaccgatggcaccataaacttctagaaagtcaactaccaccttggttctgtgtgggaaagtaaaattttatgttttccataaatacaagatgaagacagcatttaaagcctatccctgaattggatagatcattttaaagtgagtttgttgcatttagaaaccatgatccctattggccctacaacaaggcaattttcatatcaggcaggtcctggcatctggggagactggctgtttcctttgttgccagggaaatcatttcaaaatggaaaaaaccctgaatgccagcccccagcaatcttcaaaacaatacacattctttaaaaaaaaaaaaagaaagccaaacaacaaaacaataggtaacacaaaacccagtacattactgtacactagaaaggtttttttctttcccaactgaagggatgaaagggcatcataattttgttttcaaatgtgtttaagaacctgttattaaaacggaattaaacccaagtcccagggcagccgctctgcaactaccgggagataatcttgataatgcgattagggcctgcttcagtggggctgggaggggaagggaagtcgagatgcccaagcgggagctctactgagtcacctgcaactgcccgtgcccgaacacagatgcctcgatctccccataaccgggcaatggacccctgctcttgggagctactaggggcctgaaacaataagacgaataataacatttattgatggctccctataagctgtgctaaactttcacatgtattttctcatttctatcctgcaaggcagatactgtcatagacacacctgcacacacacccatgttcagaccagtgcagaaatcatcaatgctgatgctgtcttgatggacaattttgaaatttccttcatcacagatcttttgcacccatcggagttcttaaaatattgcttgaaaatattctttatctctccaagtttctctctctctctcttttttttttttttttttttttttggcttcactgaagccacacggctgatcagcaccagagctgggattcaaacccaggtctgccgatggctgagccttgcctttcactgctatgatctatctacaggattgtgtggtttggtacctaactgcaaacgactcagatctcttggaaaacttttatgtactagcaatctccactcccactccacagcgaaataaccaggcggctgtgattgctgctgaaatcgtggccaatgacgaacagaaagtggctgtgcaaataagatcctcctcatttatgttacattttagcctttgcttttttatccatctggaaagcaatgcccactctgcacctctatctaatgggcccgttcaccagcaggctgtgacagccgcatcctccacagcactgtactttcaccggagacatctgaagtcgcagaataacgtcactgattaagaggccagaggaaagaaggaagtaagtgttcgttgagctttgactctgtgccgagccctgtattaggccttttacttactagatctcattgaaatgtcacaaaaattctgtgagggagatggtgctcttctccccatttgtagataggagaactgaggctggagaagctgagcaattcttgggccaacaggaaagggtgatgttacttgctagaggtcagaggcagtgaataaaggctatgaggacagacctactctctgataattccatctgagcggtctgtagccctttctgcctggttgagccatctttattttctcatggatggtctcttgaggccccatggacctgtggccagttgaacattattctgggttaagagcagagcttggcaaactttctccacaatgggccagatagtaactattttaggctttgagcaacatatggtctctgttgcactattcaactctgctgttgtaacaggaaagcagctgtagacaatatgtaaatgaatggatttggctatgttccaataaaactttatttacaagaacaggtggtgggccgtagtttgctgatcctggttaagagcatagtttctggccaggctctagctcacacctgtaatcccagcactttgggattgggggacgggggggcgggagggaggggagggaggggatcacctgaggtcaggggtttgagaccagcctggccaacatggcaaaacccccgtctctactgaaaatgtaaaaattagctgagcatggtggcacatacctgtaatcctagctgcttgggtggctgaggcgtgaggatcacttgaatctgggaggcggaggttacagtgagccgagatcacgccactgcactccagcctgggcaacagaacgagactctgtttcaaaaataaaagcatggttgctgaagtcggataggcctggggtagaatcatagcatcatcatctgttagccgtgtgatcttgagaaacactttttagattctgagaaatgttccttataccatgagcctcagtctcttcatccataaagtgggtctgtagtcacacctacctcatctgaggtgtctgtgtgccctgggtcaggaaggaggcaagaggaggctcccaggggagtggtcaactccatcagcttcattatttcctctcccccaggggcaggctttagccagcggccggcaggactggacagcagctgtttcctttgagcgattgccctgttactaggtgtcagtgtgggcacaggtccaaaggaggctgctgggaccatccgcagtgtcggggaagtgggttgctgacaccataggccagggtggtttacttgatactaagccccaagagtgggcagagacaccccatgaagcttctcacttccagtctgagcatgtttgggtcggctccatcccttgtcttcgggactaaacaggaggccgatgttaggctgtgggaggacgaagttcagctaacacatcaggtcccaggcaccattcctagcagctcctccctccaaaccatgagtattttggttcttaaaagctaagtacatttctgttttatatgatgtgattatctttacctctgaccaatactggtctttcttgatatctttcttttaatggggtgtgtgtgagtgtgtgtgtgtgtatatgagtgtttgcctgtgtgtgtgtatgtgtgcatgtgtatatgtatgagtgtgtgttggggaagggagggaggcaattcacaagaaacacctctctctcctaaacttctcatttttctaagaaagacactatttactgatcacctgccatgtgccaagtactaacctgagtgcttttcatccattattgccaatacttatatatatatgtatatattatatatgtaaatatatatatacacatatatatgtatatattatatatgtaaatatatatatatatgcacacatatatatatatatatattttagagaggggggatctcactgtgttgcccagggtggagttcagtagcacaatcatagctcactgtagccttgacctcctgggctcaagcgatcttcctacctcagcctcctgagcagctggaacagcaggcgtgcatcaccatgcctggccagttttaaaattctttttttccatacagacagaatctcaccatgttgtccaggctgatctcaaactccaggactcaagcaatcctcctgcctttgcctcccaaagtgccgggattacaggcacacccagcaatgtgtgtatatcttttaagtagtacatgggaggcattcttactcctatttgcacatgatgaaactgaagacaggaagggaacttggttcgccggggccacacaggcaagagagggagagtcaggagccaagcccagacctacctaatacagaagcacttttttcctttctcgattgccagctatcccttctctctttaacccatcctctgcagagtcagtgttcagaggtgtctttctagtacatattttggagcagagtttgacattccctgtcaagttaaaaggacaccaacgtatttcatatcctcatattaaaagccaatgagttataccaattaggatggctgctgtaaaaaacaaaacaaaacaaaaaacaaacaacaaaaaaacaaacagagaaatcacaagtgctgatgaggaaacactggaatctttgtgcaccgttggtgggaaaggaaaatgatgcagttgttaccaatgacaggatgatgattcctcaaacattttgaaaataaaattaccttatgatccagcaattctgcttctagttatgtacccaaaagaatggaaagcagggtcttgaaaagatatttgtacaccaacttcatactagtgttattttcaaaagccaaaaaaagctggaaacaacccaagtgtccgtcaacaaacgagtggatcagcaaaatgtgttctgtccacacagtggaatattattcagccttgaaaaggaagaaaatgttgacacatgctaccagatgggtcgaccttagggatagtatgctaagtgaaataagcatcccaaaaagacaaatattatatgattccacctatatgaggtagttagagtagtcagatttataaaaacagaaagtagagctgactggccgggcgtagtggctcacgcctgtcatccaagcaccttgggaggccgaggtgggcagatcacctgaggtcaggagttcaagatcagcctgcccaacatggcaaaaccctgtctctactaaaactacaaaaattagctgggcatggtggtggacacctgtagtcccagctactcgggaggctgaggcatgagaattgcttaaacctggggggcagaggttgcagtgagccaagattgtgccactgcactccatcctgggtgacagagtgagactctgcctcaaaaggaagtagaatggcggttgccaggggcaaccatgttgatattggtttgaccaatcttttgctttagtgaaaaaaacaatttagtgattcctacctgattatgcatcagaatcttctagtaagctcgttaaaaattggtcactgtgacaagtacaatattccaaccctactccagatttccactggcagtggggcccagggatccttttctttttctcttttttttttttttttctgagacagagtctcgctctgtcacccaggctggagtgcattggtgtgatctcggctcactgcaagctccgcctcccaggttcacggtattctcctgcctcagcctcccgagtagctgggactacaggtacccaccaccacgcctggctaatttgttttgtatttttagtagagatgaggtttcaccatgttagccaggatggccttgatctcctgacctcgtgatctgcctgcctcagcctcccaaagtgctgggattacaggcatgagccaccgcacccggctggatccatatttttatttggctcctctgctggttctaatgcaaccaacccagtgtttgagaaccaacagcacaaatgatccttctgcccaggcatgggactggttcgatatttttacatttggggttgtccatgtacccctctttattccgctgccccaacaaagatggtcctttccacttagatacctgtgaccaacctcatcttgtgtcacaccaccagcatccagccagatcctgcggacaatggggtattcaaacaaacaggagatccatgggcactgagcagacctctctgtcctcttctagcaatctttaaatatgtccagtggctgcctctttttttttttattactgctgttgcactgaaaatgtgtcatcactgtttgctgtgcaaccttttcatcccatggactagtttggcatcaaaggaatgacatttatcgactctgctgatagaatgattgatgagtaagtcatgcaatggtttcagtccccgtcaaaatcaattatttaagggctatacatttatatttgctgtcaagaagcctgacgtcaccagagtcaaccttcaggtgcgtgttaggggctggggtgggtgtggggaggcagaatagtggcgtggttgagggcacaggttctgtaggccaactccaggcctggaatcagggccagaacctctcagtgtatccgtttccctgatatgaaaagtggaggggctaaccatccttacctcctaacgattcagttagagaaagcccggagaccattagacactggacttggcccactgtcaagcctgaatcttcaccattatcatcacagctctccatagcctagttgttctgttaaagcacacggctgcctagttcgggacaaagtcagcccctccccactaaaggctgaagtgcaccaccagtgtccaagggtgtcattttcctttggcagtttggaggctacaagaaggagaagctttgctcaaaaaaaaaaaaaaaaaaaaataacatacagaaaggtcaggagatggataacaatgtcttcggagatgagttgagctgagacctcagccatctcatccttggaatttaaaaaaaaaaagctttacagagaagcatatattttttattaacagcccagcaatatctataatgacggagagggtctgccgaaagaatagagcctcctaccccaacttctggccccctttccctgccgtctcagcgaggatctgtgtatctaccagagaagatctcgtgtgtggttattatagaagtgattgaatatgggacaaagcattatggtcttgttgggtgagtcggtatcagcaggatttgtagagggttttgttttcttctcctcgccccctttccctgttctttgtaatgtctgtgtttacaggaataggacttgcatttgcttgtctataataaagaagttattaattggattaaaaagaagggaaaggttttcaaggagggaaaccaagagattcagaatttggggagttgcatgtaattaaaatattcatttcctgtggctgccagaacaaattcctacaaattgaatcacttaaggcagcagaacgttactgtgtctgttgagaaagctggaagtacaagatccaggtgtccacaaggatacacgccctctgaagcctctgggggaggatacttccttgcctctttcggcttctggtggctccagacactccttggcttgtagcaacgtcactccagtccctttctccctttcacggggccttctccgtgcctctgagtcctctcctcttctttttttagtttttgagacagagtctcactctgtcgccaagctggagtgcagtggcatggtcttgactcactgcaacctcagcctcctgggttcaagtgactcctgcctcagcctcccgagtagctgggactacaggcgtgcgccaccacacccagctaatttttgtagttttagtagagatggggtttcactgtgttggccaggatgctctcgatctcttgacgtcgtgatccgcccacttcggcctcccaacctgtcctcttcttataagagaaccaaccgttgaatttaaggcccaccctaaatccaggaagacgtcatctcaagattcttaactaatcccatctgcgaagatgcttttccaaataagttttccattctgagattccagatggatgtgaattttttgtggacaccattgaacacactctggctgtttactccatctgccagctgggatactcacaggacagatgaggaaagtgaagcatacggagccctggctgtccatggaaatagaacagagtccatcagcatcctcagagcacatggttttcagctctccttgaaggcgcggacctccagaagggttcacgtcaccttgatgaggggactcgaaggtgaatttgcactgggttccctttcagccaagcatcagtttgctccaacctcttgagcacacagaagttgagaaaaattgttattttagcaagaacactagaggactgtgctgttctctgaaccacgttcatctgattatgcatttgagggtatgaattaatccacgacacaggaacactgaataagttgtgctttgccagtcgggctgcctgtgttttatctgaacaaaacatctgactttaaccccaggcagatttctcttcaggttgtaattattctggaacaaacagagaatttgggaaggggcatcccagtgggaacaatgatacctcctgtgtggaaggattcccactggaaattttcaaaacacagtgtactgaagttgacccggataactgctggctgcaatccagcttaccctcttttatgtagatgagttctcaaaaaaaaaaaaaaagaatgaaaataatttcattttcagattagataccattctatacaactcggagtgatcaaatcgctccttgaagccaaaccggaacaaaacccagattctctacacttaacaccttaaatccatcttcttcatcttccttttgaaaatgaaaatcctttaagctccaggcgcaggaataaacactgatgtgactgttgctcagataggaagattaccagggaaaaaaacaccaattctgaggttgctttcaaatgctatgattgtatggccccaaagggactcttctacacctctaaataaattcttccactattaacgagaaggaaaatgagagggaaatgaaagtctccgagaaacctgggaacttcatatgtaatttcctttcttgcaaatagaaggcccttgaatcaaaacttttcatgcaggcccctttcactctggcctgctctgtgggaacctattctgcttcagaagtttattgaactgaacgtccctgggtgagtccatcagcggttcatggctgtcctttgtcccagctttccagtcctatgtgaagtggcaggaaaaggaatttgggcccgtatctcagatgaggaagctgaggtctaaaggcacaaagagacctcagaaggtctcctcacccaagtgctgagttctttctcgggagtagccagtggacttgaaaaagggtcgattttgcccctctcccagagcccacctggggaaagggccgaatcccttcttcctgtttcccctcctccttccccacctgtccctccccacttcctctctcttcttctctgtgaagcaggaggtgttgcctcctcccctccctgctaggatgttgatgctgctttaaaaatctgtcagcagctgctccccaggcctccgtaaggtgatagtttgtcgcaggaattcagactgtaaacgtcatctccccttctgcgacatgcatctgagagctcctatttttgaaaaaataatagaataggtgcatgctaatggcatgaagccggctgcagctcacgcagcttgacatcaatttgtaactgcaatatgttatatattgaaaaggagtttgcgtttggaattctcttctcccagagcagtacatagaatagaaaccatgcagagaccccggagaccctttcagacagagaacatttatcatggccttggacaaagggggattttcaaaggtttatgctattcgtaaacatcttttaacccattgttatcaaggtgtttcttctattgcttggaaatgatgggaaactgaagacacagagtgggacctttattcaaggctaggagttggcctggggtgcagccaccatccacctccaccccaacttgggaagccctggctctcttctgtgagaggatggattttgttagcatctccagtctgctgaaaaggggccgtctgggctctggagctttcctgtgagctggctgagtgctctgggttgctattaggagccagtaggtaaaggtcaggggaggctgccaaacatcccacaatgaacaagacagtctccccacaacaaggaactatctgaccccaaatgtccacagtgccaaggttgaaaaaccctgctctaattcaacccttttgatttccaaatagtagaaccaagagctgggcgcggtggctcacacctctaatcccagcactttgtgaagctgagcggggaggattgtttgaggccaggagtttgagaacagcctgggcaacatatcaagaccccatctctacacaaaaatgtttaaaaattagccaggtacagtggtgtgcacctatagtcccagctactcaggaggctgggatgggaggatcgcttgagcccaagagtttgaggctgcagtgagccaagatcgtgtcattgcattccagccttggtgacaaaatgagagcctgtctctaagaaacaaacaaacaaaaaacaaataataaaaccgaggccctgtgaacctcgtctccaatattaaaacctctcccagctgaaaccatcctttgtatgtgtattttaaaatagttcagtgcaatgagaattaatgaacaactgaccaacttttcctgggtaccgccaatctatcagaggctaccaagaagtacaaatctgccctcaagattaccattgacttgaggagtcatctttaaaagagaacagccatataagatggcatcccctgtacaatggcaaactggtggcccctagctgatctggtctatgtagatactttatttggcccgagagtcttctcccttcccttccctccccagccctcccctcccctttttcattcccttccctttttccttcccttcttccatcctgcttttaggcaaaaacttagactctttagtatactataagtttctctccccacaagatagttcatctttaccagccccagaggtgcaagcccacctcctgaaggcatttgtgtttgtgtcctcctagtcaaaggcaggggtattcaagcctgagcgagcctcagaggcacctggaagcctcgttgaaaacaggttgctgggtcccaccctagagcttctgctaccttctgcttcagtaggtctgaggtggggcctgctgatttacgttcctaacacgtacctaggtgatgctgctgccactgctccaggggctacactttgagaactcaaggattctcaaatgatagtatgcatcagagttacctggggagcaggtgaaagccccggataccatgaactcatcccctctgattctgattcagtagatctggggaggggcctgggcatccctactttgaacaggccttccaaatgagcccgattcataccaagaatttgagaatcattgcccttaagagtccaataagtggtataggccagtgcatgtggatttgaatctcttgttaaaacacagatgctgattcagtaggtctgggctcaaggcctgagattctgcatttctggttagttctcaggtgacccctgtgcagctggtccaggtgccacactttgaacagcaagggatagtccagtgtttctcgacaaggggtgacttaccttctgaggaacatttgacaatgtctgaaaacatttttagtaatcacggctggagggtggggaaaattctactggcatccggtgggtggaggccatagatgatgtcaaacatcccacagtgcacaggaaaaacaaaagattcaatcccagaattggaatagtgctgaggttgagaggtcctgtggtagaaaaaggcattgagaagttgcctaatcacagatgttgagccagggtggtcagtgaaggcttcctggaggagggggtacttaaatgagggctgttgtccaatatttggtttatctagggtctcccttctccacagcgcatgctgctatctaatatatatttaacttacatgtcttacttacagcatttcccctgctagaatgcaaacttcagaagggttagaacatctggttggttcatttaggtatctgcagtaccaagaacagtgcctggcacatagtaggtgctcagtaaatagtaaatgaatgagtgaatggcagagtctttggagaaacagaaaggaggctggtgctgggtcacgtactgggggagatggcaaaattatttgtgtcatcattctttcactcccccattcacaaaacatattaaagacctgctttgcaccagctccctaggcacaaacccttgatctgttcttcgtcaaggctatgagataggcccaccacttatttattgcttttcagacattgagagaagggcagtagaatttccccccgtgggcaaagggcccatccttttttttttaaaggactgtttgaaacatcctaattttatgatgccagcaaaggaatctctgtatatgataaagaaaagtaaaaatgaaaacaaatgtttatatctcttttcaattcactgcttttcttttttaacctcatttccatccagaaagttcttgccccgtattttttgaaaattggaaaatcagacccttaatttatgtgtctgcatttgctagagtgagcggaggagtgtggattcaaagggcctctttttagaacattccattttcccattagcgcaagcctctgaggcacctttgtgctactctctttagaaaagagaatattacaaaaacacgttctaattattgttggcctttcattactttagagcttctgcacagcctagaaatgaacatccttgcctcagaattttgtccttattttttttttcttttgggagatgtgtcatccctacagggctatttatgaagcccaagctggcagaatttgtctaatgtgcgtaatgtagaagaggccaacaccataatgaaaggagcacctctgagctcatttgcattcccccagctggttgggaaacaaaagcccactccgtgctacacttcatggttcacttattgtggttcatttcctccaaatcgagtggtaggttaaaaagaaaagaaagtcaagtcttttctgcagtgtcctctgcccggcattcacagctgggttttaatgtggacaggttgttgttgcatctggagaaggaagagtctttgaacatgatgtggcccgaaccctccctttcgacaggtcaattccataacagtctggctctttctcgaagagctcccaaggccgaggatcattgaaagctcagtcgttttagatcccgcccaaagaatcagctctctcctctctggctgtgtccagtgtattacctgttggtatccaggcacttaggtgtgggtggaagaattgctctctgacaagtttcagcagacacagaatttatcaaaggctgtcagggggctcacagaatccagaaggtcagagaaccaggttcggagcagctacacagcaggaacaatgcccagaccccattgcaggattgctttgcggagacagcagcactgccattgctgagcacaggcaccaaaaagtgtggccctgacaccatacaccaacagccacctctaagctgctgtcactgctgtctctgggcacaggatagggctaccatagccttctccgagatctgtctgatgccctcttctctgagccacaagcttctacctcagagtctggcttaggcacagcctgatcgttggatcccaggccacgtgcaaaagaggccgagaacgtttctggcttttaatttggaaagatgtaggcttataacattggggaactcctgaaacaaaaatggtgttcaaagatcagcgtggcccaaaagaatgacagatgcccattagcctaggaaggccttaccttggtacattatatcacagctggaggttacagggcagcaagagacggaggcccttcaaaggattgccactgtccctgtgtcccatcacaggctcaactgcactgagattttaccagcccccctcttccagtccttgactgaaggtggattctgcgaggaactgaccagggctggccctggatggacacataaccatgcctacaacccacagcaaagcttcttggacacccaggtggtggtttcaaagtggcccattgcactgagcctttgtttccttcttggaagcaacagccgtgggcttgtgataatttgattgttttgaaatgggaacaagtgactgcctgaagaagggcatgcatgatgtgaaggcagtttgaagaatgcctgaaattcagaacgtcagggaggaagcgtccttcgagatcatcagggccagcccctgcatttcacagtaggagcagctggagaaggaagacgtgttgttggatccatcagctgctgttggatccattgtgctgcctcaaggatgcaggctgtggaaacagggagctgcagatgcctgagtgactttgacagaaacttaccaggaattgacgtagtttaacatatttatcaaacaaaatctttgctgaattcttggcgccggtcaaccccttccccttccctccgtgtgctttctcttcccaggctaaggagtcttaacaccttaatgttcagaatctcagagaaggtcctgtgtgtcatcaagtccagggattctcaaagtcctcagtcctcctttgtcagattcaccactggactttggttagaagcaaaattcctgaatcactctgcagtgatgcccagggatgtgagtttttacaaaagcttctcaggttatttgtaagcacgttgaaattcaagaacccgtagatctaatccaaactcctcatcttatgcatggggaaatggagactcagaagagaagtacagaaacttgctcaaaggtgaacagatggccactagcagagctgagcctagaattttcttattcatatttctagtcctttatttctgactctgatcttctggcttctccagcagatctctttttttgtatctaaattaggtggcattgaaagtcaacagcagaactgaaagtgagccctgttttatgccaagaagatctttcctgcaaagttgtgagatgcatttgctcttaaatgcagctgtggtcaccaaaagaaccatgaaccagctctgttgaggatttgatcagtttagtggactcgttgctgaaagcaaaggtcaccctgggctcctggaaggaaggggcactttctacatgccagatgagtgcttagtggcttacacacctcccctgtaatactctccaccttcttcagggatacatgctaccttccccaggtagattttattcatgcaaccctagaccttgccactcaccaggacgagttaggcacttctaagcttaagcggaggacaaaggccaaatgtcttgaccacttgtccttgttcactctgggatgctgctattgatgtttctttggcagtgtaactgggtcctgtagctgaaagtagacagagattcagtttaaaaggaaaattaactggaaatcattttatctccagatgtgcccaatgcaattttatcttgttttcttttcttttcttttctttttttttaagactgggtcattctgttgcccaggctggagtgtagtggtgcaatcatagctcactgcagctgcgaactcctgggttaaagccatcttcccacctcagcctcctgagcacctgggactacagacacgcaccaccacacccagctatttttattttatttttgtaggaacaaaatcttactgtgttgcccaggttggtcaggataattttatcttcaaggctcccacattccctcactccgaggtgccctgtgctggcattgaggtcagtctcgtggtgttagttatttagatgtgactacactgtttggtgtggcacattggggcagctggtttattcctcctaccaaggatgtcctggctgcctggagcaagagccacaggctgccaccaggccccactgccttcacaccaagagggcagcaggatggggttgtctgacgttgaacttgaagtaggattgggttgaactgactgttgaactggaagtcaagttctcagagtgcgtctgggatactcagcatcaggagagggcccgcagggcaaccctcagacatctggtaggaaatgagctccagggcacttgggggtgttctctttgaaaatatttccctcttattttcactgctattttttgcaatgtttgtccttctacttggaagattctcctgggtctttcatgcctgtgtcctcagtgcctggacaagtgtgtggcatccagtcaaggagggcaggaggctgatatcccccacctgcctctccccactccaatctaccatctcatttctttattatgtcctgttttctcttttttggcatgcctattacccatctccatcattagaacttacatttcagagctgaactcggtcttcttctaatcattccatgcctgataccctgtagatacacagtaaatattctggggagtggatgttaagtaaaagtacgtgctcaataattgtttgttcattgcttgagaaatggggactttgggggaatagccaaggttgttctcagagaaccttctggccctgtgtttgatagaatagagagtcccctcttgccttgtggattattttcattttctgttgctctgagtggcagtgactttccctttggccctgctctacaccccgagtatggttggccccctccaagtctaagcacaggacatctgaaaaaggggccaaaatataggggaggtgaaggagatgctgaccggacgtgttgggaatgaagggggagagtgaccagcacctgcaacttgagaatcctcaggaaaagacccagggatgagatttggttgttcctggttttttttccggtttgaaagagctgttttccctcctcggatgctggcattgatccactttgaattagctgttgactccctactgggattaccaagaagatgatctttaattacactccttcccctgcctgcaaggccaagctgaaatgatctgtcatattctgttggattccctctatatgcaaaatgtcaggtccttcttgtctaacccagagacattgagcttgaggttaggaggatcgactttgattccctagcctgtgtctagccagctaagcagccttacctagggaggccacttcacgtccctgagcctcagttcccgtctctgtgatagaaaagatgatgcttgctctgtcctcctgcagggaaggttgtaaagactgaataaaataatgaatgggagctaaaaagtggagacaacccaaatgtccatgagttgatgagtgggtaaacagaatgtggtatatccatacaacggagtattatccggcagtgaaaaggaatgaagcagtgattcatgccacagcatggatgaaccttgaaaacatcatgctaaagggaaaaagccagacacaaaaggccatatattgtatgatcccatttatatgaaatgtccagaacaggcaaatccatagagttggaaagcagattggtgggtgccaggagctatggggaggggagaatggggagtgactgctaatagggatagagtttcttttggggctgatgaaaatgttctggaattatggagtagtgatggttgcagaactttgtgagtatactaaaaaccactgaattgtatactttaaaagggtgaattttagggtataagtattatatcacaataataaaattaacacacatataggaaaggactgagtaagctataggatccatagcattggagtgttaccatcatcaacagcatcctcttcatattctagcatttatttagtgccaactgtgtgcccagcagtatgacaagagcagtgcatacctctctttgtgtcatctttgttttgtaaagaagaccgaggattagagaagtgaaggcccatgatcaaggttacaggttacagggctattaaggggctgcctggaccgcaaagcctagacccttcccattatcccatgctgctatctcacttcaagggcttctgagggataatgatataacttattttttggagacctagccattgtttaacttaaaatggttcttaggacttcactggtgatacccaagactcccattggaaaggcagaaatatctgcctggtcagtgtaagtgaaccttccaagctgtagaaattgactggctcatgagtgactcacccatgagactagccagtggtctctttggcctgtggggtaagagtggactccaagaattctgagaggtgatgacagactctaagacaccccaggggcccattttcagaccttggcgatgacaggcacctacccagaggcttaggaagaccatcccagggttcctctgggaagggttgaaaatcagctttgcaatcacatcatgtggagaggaggacacttccaggccttgggaattatttattgatgggattcccttgagcctgctcccatctgtgaagagagaccgaggatgtggcctgctaagtccagaatagccagggtctgcaccagtatatcaaaaagctgctgagtggagacagaaaactctgtaactgtcaatggggtatgcagagtacagcagcccctcaggggaggtcccagaacctcccaggtgtccatgcagctggtatgtgtgctttacggagaaaacacagatagcttgtgcagaaatgggctgtttgggggccctgagctgctcctcatgccctacgaagtctgaccccagaattgggagtgactgtctggtgtggcagaagggactgagaggcaaggggctctggcacctctgatggttaaattaagtgtcgactggattggactgaagatgcaaagtattgtttctgggtgttgccggaagagattaacatttgagtcagtggactgggagaggaagacctgccctcaggaagacccacccacagggtgggtgggcactagccaatcagctgccagcgcgactagaaaaagcaggcagaagaaggtggaagaagctgacttgctgagtcttccggccttcatctttctcccgtactggaggcttcctaccctcgaacatcagactccaagttcttaggtttttggactcttggacttaacaccagtggtttgcgaggggctctcgggcctttggccacagactgcaggctgcactgttgacttccctacttttgaggttttgggacttggaccgagccactgctggcttccttgctcctcagcttgcaggcggcctatcgtgggactttaccctgtgatcgtgtgagtcaattctccttaataaagtcccttttgtatatacatatgcctattagctctatccctctagagaaccctgactaatatagcaccttagctccagctcccatgggctgtttgatgcagggcgagccccttcccctctcaggctcaggtttcattatttactacagatggtgttaaactgcaaaaccagtgagtccacctttactcagcaagcctttgctatggccctactctttgcctggctctcagcaaggggatggggatataatggtggatataatatagcccttatgtaatatatcccgtatgtaataggggatatatagatggggatataataggaccgaaaaagggcatcagcctcacctttttggagcttacaggttagtgagggaaccagagattaattacataatcccaaaaacgtataattacagattgtggtaaatgctgtgaaaaagcagcaaatgtttctgttaatgcacagactttaccttttgcaagcctactatgtgccagacactcgtcacgcttgtataaaatgtacctggaattttgcctttattcgggtatggtgaagtccataaatcaagagacaattaccgttgaaaatatagtttgttacttacagttctcaagagaagcgggcaggccaggccatgtagggccgcatgaggaagtaccagggtcggttagcaggctgaaggaggcaaggggaaagcctgggccagagcttttgttgggtctttttttttttggaaggaataggcaaggcagagtaagtacaccaagtaagtttaggattggattgtttgaataacttagttgagctctggggtgcaggggtggtccctttttgttgaatgcctggccctggggtgatatggggtagggggaatattggtttggtatgtgacagtttgataaaggcagtggtaggggctgtgggttccggattggttgatttgcatagcaaaggtgcgttcacaggcaggttgtttgctgtctctaggaactaacactccctccccaggtctgaaaggcaccaagatgtccaagcattgtaaactctagaaaataaaaaacatgaccaatcaggtgccttacgtgtttgtattgaccttttaaatcctcacatttgccctgtgaggtaggtactagtgacagcagcatccccattgttcagatagggaaactgaggcttagagaggtaagaaacatgcccaaggtcacttggctagtcggataggcatcaggttttgaacccagacagtcatgctccaccactggggcgcctcagaatctcattcctgtctcggtcttgtcttgttgagcataataagtgaggagtgatttgtggctaaggctcaaggaggcaccacttgtgtcaagggtgaaggatgcagtgaggaaggaaaggctttgagaccaacaggacaagagggagaaggtggctggggcacagctgaccatgcaactcgcctgtggaatgtttaaagccggcagatgctgggcccccactccagacctactaaaccagaatctctctgggaggtgatatttttaattaaattccctgagtgactctttttaaaattatctttttaaaaaaattacggtatgattcacatacagtgaaatgcacagatcttaaatgtacggtttgatgagttttgacaagtgcatacactgatggtaattcacacccctaccaagacacggaatctttccctcatcctggaaaacgcctttgtgctccttcccagtccgttcctacgtagccctccccctactcctgcagctatggctctgagttctatcagtatagattagttttgcctgatctagaactttatctacgtggatcctagagtatgtgtacttttatgttgggctgctttcactcagcaaaatatttttttttattatttaagttctgggatacgtgtgcagaatgtgcaggtttgctacacaggtatatatgtgccatggtggtttgctgcacccatcaacccgtcacctaggttttaagccccacagaataggtatttgtcctaatgctgtccctccccttgcctcccaactcccaacaggccccggtgtgtgatgttcccctccctatgtccgtgtgttctcattgtttaactcccatttatgagtgagaacatgtggtgtttggttttctgttcctgtgttagtttgagattcatctaagttgttgtgtgtttcagtagttcattcattttgtagctgaggagtattacatggtatggtgtgttttaggctgttgttgcattgctgtaaggaaatacgtgagactcggtaatttagaaagaaaagagccttcattggctcctggttctgcaggctctacaagaagcatggtgctggcgtgcttggcttctgaggagggcctcaggtagcttacagtcatggcagaagatgtagagggaacaggcacgttacaggcaaaaggaagagcaagagagagaattagcaggaggtggcacacatttcaagccactagatctcctgtgaactcagaaggggagctccctcatcatcaagggggctgcccaagtcattcctgagggatccgcccccatgatccaaacacctcccaccaggccccacttccaacactgggggttacatcgcaacatgaggtttgggtggggacaaatacctacactatatcatgtggctatgccacagtttatctattcattctcctattgatggacacttggattgtttccagtttgggctactcggagtaaagctactatggacatttgtgttcaagtctttttgtggacatatgttttcatttctcctgggtaaatatctaggactggaatggtgaggttgcccgtgggtgactcattgcagccagcccaacactgacatttcagaaactctggacagaccaactcatgactgtaattcttttgagctccaaaactccattttcagcttgaaagtggcatttgcagttgctacattttttttaatggtggtaaaatagacataacataaaatttgccattttaactatatatatatgtatatgtgtatatatatatatatatatatatatatatatatatatatatatatttttttttttttttttttttttttttttttttttttgagacggagtctcgctctgtcgcccaggctggagtgcagtggcgcaatcttggctcactgcaagctccgcctcccgcctcccgggaggcgttctcctgccattctcctgcctcagcatccacgagtagctgggactacaggcgcccgccaccacacccagctaattttttgtatttttagtagagacaggatttcaccatgttagccaggatggtctcgatctcctgacctcgtgatccgcccagcctctcaaagtgctgggattacaggcgtgagccaccgcgcccggcccattttaactatttttaaatgtattgttcagcagcattaagttacatccacattgttgcgcaaccatcatcactatccatctccagaacgtttttcatcttctcaaagagcagctatccccattaaacactaactctccattcccccttccttccaggccctggcatccaccattctactccctttctctatggatttcactgctctgggtaactcgtagcaggtgaatcatacagtattgttcttttgtgactgtctggcttcacttataataccttcaaggttaagacatgggtcagaatttccttttttttttttttaagacagggtcttgctcggttgctcagggtggagtgcagtggcataatcatgacacattgcagcctcgacctcctgggctcaagcaatcctccagcctcagcctcctgagtagctgggaccacaggcatataccaccatgcctggctaatttttaaaaattcattgtagagacaggatctccctgttgcccatactggtctcaaactcctgggctccagtgatgctcctgcctcagcctcccaaagtgctaggattacaggcatgaggcaccatgcctggccagaattcccttcttttttaaggcagagtaatatcccattgtatatagagaccacattttgttgttatatttttaatggaaaaaaaaatgtattctaaaagaaaacagagtttttaaaggaacgtggaattaccttgccctaaactataaattcttcccttcctcacatatttacctgttaatgctcatgacactctagacccaggaggtctttaaatgcaaacaagtccacacaaggtagatgctaccatctttttattgtaagagatggacacatacaggatcagcagctgccactggcagctcttctctcccatttgaactggtttcccaggaagtctgttaaaaatcctctctccttttctttttcaagagcttcagttcctaccagagtctgaaaagtagatctctttgtttatatttcccttggctgttttaaagccttatttgtcatatctgacatagtgcgagttccctatcagatatgagaggaggcgcctgctgacagcgtgatgggatgggaaatgtgagctgaaagccatttagactctgaccctcagtgccttcccaggaactggaagctgccaagagtctcagtggtaggaacgaccctgataaaaacaggcggagttaattgcctgggtgctgagtcgctccagaagtgcaaggaaacaataaaggtcgtaattaaaactcagttgctcgaatttgagagttacagcctgtctcaaagaagatgcgtaggtcaaacacacgaattatattaatgggacgtgactgcagagatgaagtgcaaagatattccacccattctcctccgggggctcctactgagcctttcaacctcaactcaagatgctattaggcattcttggaccctccaatgaccactctctccttccagcctccactgcttcccctacgttttctccactccagcccctgtgacatggtgttgacacactgaatgcagtcaatgaataaatgataaatggatgcacattgcgtgtcacttattcacgacccatttattaacctcattagagtatcagctctgttaaagcagggactgtctcatcttctccccagctcccagcccccctatctggtaccaaggagatcctcaggaaaggttcccaaacttagaagcatagtgcacatcctgtagtatcctcattagtgctgtgcagtgcgtgcttcctctccaccctgtatcctcagcattgctgagacagccattatttcttcttagttattattttttggatcctcggcatctagcccctacctagcacatagtaggagttcagtgcaatacacactgattcttgaatgatatttcagcagcaattccatttttcttatgcactggagtatttgtatttcttctgaaatacaacaagagttgtactccagtaccttgtctatcccactttattctagaatagaattagggaggctgtcttgggcttgggctgtctacgcagagttttattactcaggtaccaagctaagccctggccccgtatcaagctcctataagtgtctcttatcatcttcacaaggcttgatgtgcttgcttttttgttgagccttttcatggacattgtagactccaggaataccaatctcagggcagtggctttgcaggtttacctcgtggaatcagcgttggggctgtgggcagaggatacttgattggtattagggttgcacagaccaagtttgatcccagctccaccactcatgggttctttgacctcaggagcaagctatttcaccctgaatgccgtttttcccatctgcaaaatggggataaatcctgcccactactacatgatgcaagggttggttggtgtgttcatttcctgtggctgctgtggcacatcaccacaagccaggtggcttgaaacaacacaaatttattcttttatggttctggaggccagaagtgtggactgagtcttatggggctaaaggcaaagtgttggcagagctggttccttctagaggctccaggagagatgtttcttcgctctttctagcttctagaggctgcctgttttccttggcttgtggccccttcctatcttcaaagccaacagtgtagcatcttctctctctgactctgcttgcctctgtttctgttgtcacatggccttcctcccagtctgacttctcctgcactcatcttatcaggacccttgcaatgacatcaggcccacctggataacccaggatcatttccccacctaaagatcctgaatcccattttcagagtcccttttaaatactatgcaaggtaacatatttgtaatttctggggatttaggatggggacatctttgggggccattatacaggctaccacagatgggattgtgtacatggtgacattcatgtaactgaagtgccatattgtcctatgtgctccatcccgagagtaaaactcgtatctgaggctctcttagtttgggttccaccagaagcaaattctgagacaaggattcaagaacaaatagtttatctgaaagatgccagaacaccagtagggcctcaggaaagtgagatatgaaagggaaggcagccactcaagggtgagtttccatgccagctcccactgggagaatggagcttaatcctgccggagaaactctgggagctggtatagagcatgcttcagagctacacaaccttaggggtgagggagctggggtatttatacaccaattcccatcagtcgttggtatgggaacttcccacaattctgtgccactggtctgatgtacaggtggcaggctgagctccagcaggaggggaaggcctcagatgaagaaatgcgggcagtggtagctagaagtcaggccaatgtgcacccatgtactgagggccaggggacatgggcagaggattggcagtgtcttctacagaggaccagggcctccaaatgctcttggcggcattcggctcagcacctgcctgagcatctctgctcttgcagtcaaatcgttcgcctgctcagagtcacttgtggttagtttcaagcctgtgtatgccagttgtactgttatttaatgaaactaaggtgaaaacttgttaggagtcaattgctttgggagaaatgctgtttagttagatacggtcaagacaactataaaagatggtggcagaggataaggaaccacagaactctagaaagagtagttgtttctcactcactttagagaatccccagctggaactcatagatgataaattacagctatggcttctgtgtgtgtgcgcacgtgtgtattcaattcccataactccgtgggatgggtattattcccattttactgatcattggtgaagaaactgaggcccaaagagatggagtaaactcccccaggtcctgcagtgagtagatggcagaacttgaatttgaatgtcttcctctttttgtcctacacaacctccatcagcctcagtctgccactcttttgtttgttttgtttttttgagacagagtctctctctgttgccaggctggagtgcagtggcgtgatctcagctcactgcaacctccacctcctgggttcaagtgattctcctgcctcagcctcccgagtagctggactacagacgtgtaccacacccagctaatttttgtatttttggtagagatgggttttcaccatgttggccaggatggtctctgtctcttgacctcatgatccacctgcctcgacctcccaaagtgctgggattacaggcgtgagccaccacgcccagcccagtctgccactcttgaagatcgtactggaatttctagagctgataccatcccacattgctgggagggattcaaggcagatatatgtggtcccctcgcctctccaacttgagagaattccttcatggaaaaagagaaattatgtctttattctacttttcttaacttatttttacaatgaacatcattgcttcttaatggactgtgggaacacctgaaaatcatagcaaaatcagcctgacccttcaccttctggcaaaagcgacctagcagaaactctaggcaccctccctcagctttgcctaatatcgggtgtagcgggaagcccagaggagaagggcctggcactggccctggcttctcagagacctctgtacctctgggactacgacagccacaggaatcaaacatccacacagaacatttgcggtggggctgcatggcccaaggcttccatttcagccctgagtccctgggcctaggctccctctggaattctattgttcagaaagagggaaaagccttcactgatacagagcttattaaccaagctattaacgccctgggctggctgggtttcttcttctgttttcatggtgctccctgcagaggcggctgggaaacaaacctttccctaggagggctagatccataacagctgcctggagacctgtcaggacactaatgtgggggtggctggtgtgctgcacttgctcccctctgaatgaaaaattgaccaacttatactatggttaccagcattcaaggtaccctcccttattttcactgaggtggctggttggctggtatgataattacttctgtattaaaatggcagcccccataaggctgggtcgaggaagtcatggaccatgtttactcaccatgtattaagcacctgctgtgactggccctgggctaggcactgtgggcacagaactaagatgcacccctttgctggaacagagagatgacgtcaacaagcattggtcagtgcaatgagagaggtgaactcagagaactggaggagcccagagaggggacagcttctgcggctccaagggaggtgtagtaaagaaggatatgcataggtggtcacaagggaactgagatggggaagatgaggctggatgaggcaagtggagagggggaaaagcgtgtgtgctctgggcagcccaggccccagcaaagagtccagaggtgcattagaagaactttccaggccagcgtgtaagacacaaggggggaggataagtctgtaaacaaatgccagtcagtggatcttgccaaggaactgggatgtgactctgtgagtcgtcactagctgtacctgcactttacagcatgaaatgtagctgcaagtgggaagcaggggactcggatgatttatcggggcaataatgaatcatatcttaagagttttctgtgcactttcatggggctcacgttgataggcaaattctgttctgcagttttaattatgcaaacccaggaggcaagaattattctttttcattttcaacatggagaccaaagtccgtgcactggacccacaccagcaacttgtgctgtggctcagtggtgcccagtgcccacggcacagggtggtcaggggcttggcatcctgcaacatggactacaagatgtcacaagttcccagcatgcacttctgatataggaacacgccagtcatagtttggctctacccccacccgtgccctagacgtctctactcctggaattttctgctgccaccatgtcactcccctctgcttttactgtcttcatacccagcctctgggcacaacagagctgggttacagacaggctgccatttcccaagttgcgttctagctagctggccatggaagggaagatcctgagattgggtttggttccagctgtgactgtgggcactttccctcgctgggcctgtttctcatttactaaaagacagtgttgagctagatggcctctcaagttcttccagaggctgcatcgattgtgctcaccaccgtattccctgtgccaggcagcaggtgctgggtctgaaactgtaaaatgaaggcatgcacactcatcacgtgcccggcagcatctgccctggggtagacatcaaggaggataaaatgagacctctgccctcaagcatcttgtgttagaaatctatcaggaagtgggtaattagaatatggcatgggcaagtataaaacacgatgaagtaaaaagtacaaaagcagcagcaagggaggggctgttctgtggattctttaattctgtttcttctcaagggagaagtcttagcaaaagaagaaagctcaacatgattgcccacagttctcagtgcacacgtactagaaccttgccaaggacactgaatggtcaggtgtctgctgtcttttaattcacggatgtattgtcttgttattctgtatgcagagaaaaaggcaaataatatgcatagtccctttcacagctgagaggacaaatttggacaaaatcatatgtagtttttcttttttaaaaatgccagtaagagttgattggtaaggctgggcgcggtggctcacgcctgtaatcctagcactttgggaagccaaggtgggcggattgcctgagctcaggagttggagaccagcctggacaacatgacaaaaccccatctctactaaaaatccaaaaaattagccagacatggtggtgcgtgcctgaaatcccagctactggaaaggctcaggcacgagaatcccttgaacctgagaggctgagtttgcagtgagccgagatcgtgccactgcactccagcctgggcgacagagtcagactctgtctcaaaacaaaacaaaacaaaacaaaacaaaacaaaacaaaacaaaacagagttgattggtaaaaccatgctgggtctggtttgtagtatctcatgaaacttacagagagctactcagggcctgcctctgtctggcagtgactcccacccaagtgatgactaacaaagggcgtgagggtctttctcccattcgctcctgattgtagaagaggcctcttccatatgctggacaaagctgccggaggatgttgatgggggtggaaataccctctagcccagcaaacctttacctttggaacacctgtgtttatggcagctggagagttttactagatggttgcaagatgaagtgtaagagaattggtctgtttggattactcctaggcaggattccgttgacactgatggaagaatcaggagtgactttcccagtgaaaagccagagtgaccaagagaaaaaaagaaacaggtgcactaccctgctagctgccagaagcgtcatggaaactcctgcccagatggcaaggggctgcgaagctagagaagcccacccctcaggggctgcttagaccctggcagggatgtgttcatcttgtcccggggcagagggcgtggtgagaccctcagatggcaggagacccgtggagaccatcaaggaccaaacagatgttacatgcaaagctaggcacctgtgtcactgagcaaaagaacatcatttcccagggttattcccaattaacagagtgaaaggggcatctgagtgcctgcagggtttccatcttctctgtgggaatcagtcacgggataagctggttggggttcctaagccctgctctaaggctgcagaaatctccctttatggccaaagcaacctgctgcgtcaacaccgtcacctcctacaatcaggtaaatggctgccctccatgaacaaatgaagacgggctgcacatctcatccggcagactcgccacactccgccgcggcagtgctcatcatgaatcatgcatctgcggtcctgctggcttttttccttgtcttttatttctcaagcgctggtaatatacaaggccctataaaaacatgtacttggtgcaatcccacataacagtgaacctgagatggcccatctgatgtttttacatgggagccccagatttagggaggccactaagctgaagtagatgtcagggagagagaggattcaccacatttatgtattcacgctgcagaccgagctgggcgttctctgcggccagtctgaaatggcacataatgacagtcctcctccttgtcaccaaaacaatcggtggttcacatgactgacttggggtgacagcagagggaagggtttttttttcatgctcttccccccatttccagttctattaagtcaaagaggaagatcacattctgctttggggcagagccattcaccaagaaggaatgctgcttctaaaacaaatccaaagctcttagcaggacaagatgcttttattcagaccactattgtatgccagccataaaacctccttaataactttgccttagatagacctctaatatccataattcattcaagaagactgactctggagacctcactgtggtttatcttagttttgtgtaattacactccccgcccctcctcacccagggtatgtgctgtgattttcacagatgttgagatacctggttttattgttcctcactcctgatccattcttattcttcctaattttgcagattcatttgctggataagaccacttggaaaacaaatgcatgttttcatacctaatgttgaatttacatttttatctcaggtgtatagagataattatgtggcaattaaaggcaaatgtatactttttcagtcatgactagggattactctgctgactaaacaagcgctgacttagatatttaactgaatgttaaattttttaaagctttggggatttttgactattgatggatggctcggtacttttaagtttcaggtggggaaaaaaaaatctcctgactttgcatcttatatttaggtgtcctggtattatgtggtcgatttcttaactacacttgcaatgtattgaaagtgaacccagtaagatacaagcagtatgtacactatgattccacacatgtacacacatgcacacaaactctacaaatatatttatacatgtatatatacatatgttcatttttccagacatctttcagtgcatgcatgaaagaataacagtattaacagagatgaactctaggtttatgggattttgttgtcttcatctttttttgtttgtttgtttttgagacagagtctcattctgttgcccagcccggagtgcagtggcacaatctcggttcactgaaaattccgcctcctgggttcaagtgattctcctgcctcagcctcccgagtagctgggatcacaggtgcacaccaccacgcccagctactttttatatttttagtagatacggggttttgccatgttggccaggctggtctcaaactcccgacctcaagtgatctgcccgcctcagcctcccagagtgccgtgattacagacgtaatccaaacaacctcgcctggcctgtcttcatctttaaacatcattgtttcctatctttagggagagctcacctgctctccatccagcaagcacctgatccaggccacctgagcaggtagcagagctcatcacagcttatcttatctgccaatttcttcctttttttttttttttacgatgaattcatttattttatgtattaaattagacaaagaaataaatatgcaactggataaaaacaatcacattcttatactacctgaacacacagtagtggtaaaaaaaaaaaataaaataatgaattgtaaaatgggccccaggatttaatgcaaacatcaccctgtacaagaaaagtttcaggcttctagcttcaccgaatctagtactaaatgtgcttctttatattcctcagtgtcttccaagtctttttcactttctaacatctgttgaagatccaaatatgcagcttccaacctgcgctggcaatctgggatcatcatctgggattcttgtaggatctctgcctgctttttaatggcataattttcaccatcttcggctctcattttttcgatcttttcttcttgttattttgcttcttttccatacgtcagtttttctttgaccgacctgcaaacctctgatggctctctattaccaagcaattcaactttttcttgtaatatcatgacttttcccttgcttctttggagcacttccagcatcactagtggcactccgtatgggtctcgtggtgttatttaagatttacattcaaggtttacaagattgcacacttcaccacactagtcttgatcttggttggcctcatgcaagggttggccgtggtcccttgagcactgcaagaagaaggagcagaggctgggtgcagtgcctcacgcctgtaatcccaatgctttgggaggccaaggtgggtggatcacttgaggccaggagttgggagaccagcctgaccaacatggagaaaccctgtttctactaaaagtacaaaaattagccaggcgtagtggcacatgcctgtaaacccggctacttgggaggctgaggcatgagaatcgcttgaatctgggaggtggaggttgcagtaagctgagattgcaccactgcacctcagcctgggtgacagagcaagactgtttcaaaacaaagaaatcgaaggacaggcagagacaccagtttcttattcaggtcctcatagcaatttgaccagttctggtcttctcaggggtcgtttttaaagggaatggaaatatgtccctgcttcgaccctaagcaactacccttgactttgactttggtgtccaaaagctccatgttgatttgttaagtagggctgattatgtctcgccttcttcagggacagtggtcctcaaggttgttttggctttcggacaacttggataggacaaaaggactgtccgcctccttatcacctccttcgcatttgccgttcttaatagaaccccttctgagatagggaggcagttgtttctcccggcaacaggatgctaagggaggggtagcagaattaattgtatcttcccaccaggaggaaggaaccacagtgctgtcattctaaatgttggtattgcgtctctgggtctagcctgcgtgttgagagccatcacctggaagaggaggatcctaagctgagagagggaaattcttaaatcagctcatgctggactcgtcttacgttgttttaccctgaatctggaaagcatagcagagtcatggggtgggactgcctgaaacggcggtctaaccactgctggtatagaaacttagatcttgcccatcaccttacccttgaccttccctcttcttccataaaccgtctgtgggatgagtgtgtgttgtgcgtgattcagcttacaccagacttgtcacctgtcattcaacagggtctgtaactgttgctttagtttcagaggcacccgtttttcttgggtgtttggaggcgagtctggaagtatgtttcagggaagggaccagatatgtatttcaaggttcagcatgttaagttgtgcttgctctccaggcgctcagctcagcccccattaaaaaggctgaactggagaattgtaacaacatacagaggggtcctgagagcctgccccacactgcgaccatgatggtctgttactggagaaggtttaaaatgtagcatgcagtctaagcatgattttaactcgaggcagtggtgtggttttagcaccaagctagaaggagatgggttattaatccttttgacattccctttgaatagcatcatatttcaatcctgttaagctgtggggccgttgtttatcggactccctccaaaagcaggacctctgctgtgctgaagctgcaaaacactgcccagctctgtgcctttcggtcgacagtcggcttcagccttctcagctgacccctccacctcatcagctctgagatcaactcaggcagctcccagctgcctcagctcacccatctgtcactggccaaggaagggtcaatgggcctggtgccctttagttggaatgtcgagaaaaggaagaaggaaaactgcatctagaaaatacttttttaagttggagggtaaggtagtcaggcatgctgaagaatccaggattctaaatgtgactatctccatgccttcagctgtctgtgttgatctcctcaactgaaacattcattcattcatttattcattcatcaaacattaatgagcacttcccaagtataatatgcaaggtgccacagacacaaggatgaacatagaagatgaatcttctgctcttatcaaatgaccatctaggaggaaggggcattggccagaggaaagttggtgtcagagtacaggatctggaaatagatcatctgggctttgaagcctgactctgctacttataggctgggcgacttagggaaaagtcatttcacctccatgagcctcagttttctcctctgtaaaatggggctaataatggtgcccttcttacagagctgttgaaaggactcaatgcatcactgcaaatgacacacttaagaggcattcggtaattgttgggtttgttattaactaatttctgtgtaatctatattatacaagggcaagcacagggtgttaggggaacatattacaggggaaatttgccttatatcggaggtcatggaaggcatctccaatgatggcacatttaagctgggaattggaggtcagtccctactctcttgtccctaagggttgactgctcacttcaaagtctgccaagatgaagcttaattggatctctgtcttctctcagcttagacagggaggctttcaggcaaggtgtataccttgaacatctttctagaactttctactgcaatgatgctatcatattgctttgcccttcattgaacaaccaaataagtgagcaatcaatcgatacctccacacagacactggaagatttgaagatttgggtctgctacaacatggccctggggatagctccagctggccttatagatctgtaaggttctccttattgccctgccttaaaattgtctcaggagttagcagttggttgaacccaacactcttggactgtcagcaaaaagaacacttgcccacaggctgccctctgcccagaagtgaaagaaattataggagaagaatagaatgcagggaagaagggtctcaggtgactttggaatgccacctctttccccagactacattccatctttttttttttttttgatggagtcttgcactgtcacccaggctggagtgcagtggcgcaatctcggctcattgcaacctctgcctcccaggttcaagcgattgtcttgcctcagcctctcgagtagctgggattacaggtgtgcaccaccatgcctagctaatttttgtatttttagtagagatggggtttcatcatgttagccaggctggtcttgaactcctgacctcatgatccacccatcttggcctcccaaagtgctgggattacaggcatgagccaccgtgcccggcctctccaccctgtcttctataccactctccctcactggccatagcttttaggggtgctatacctcccactacagccagcatacatatgtcttgatttatacagaaggtgtgatcctgaaaatctgtttataaatcttgcctgttttggtgaatacagtaaaaagccttccaggagacgtgttgatacacaacatgttatatataattcagttttcctttagctactatattaattttgtatgcagagtatttttaaattgctatccatgctgtgcttgctcctgccatgtgaacctgagacccccagaggaccatccactcatctccttccccctagtgtcagtatctcagccctttattcatcctgaaagtattggtgagcaaccctctgtgccaagtcttgtgctagtgaactctgggaacaagtgaaccacgcagcatttacctccagggagctcatagtcacaaacagggaattattacacggtgtgctaacagattggcataggcaattagtgggaacaccagcctgagggcatccaggggaaggatgcagacgttctgggcagaggggacagtttaaccccagtgaggaggtgggaaactgtatcgttaagtggttaatgctgctgagtgtaaagggttaaacagggagtgggctggtggaaccaggtcatggaggatctttgcccatggagatgggcaggaagaagccaggaaaggagtcaggcaggtgaggggtttggcaacattgcatgtttcctgcctattgcatcctcttgggaacaattctgccatttacagcaagagcatccccataggccactggttctccaacttaagcatgcttcagagtcatctagagggtttgataaaacccaaatgtctgggtcccactcccagagtttctgattcagcaggtctggggtgggactgagagcttgcatctctaacaagctcccagcgaggctgatcctgttgctccagggaccacaccttgagaaccactggttgggcattgatgaggtcaaccaggagaagcagtgtcccctagaactggcaggagagaaaggacaaggctaagaaacagtgaacaggagtcaagtaaatgcagctgccaacaggcgggggtccttgagttcacattcttggttccaggtgacgtttcctgggagtcaacaacccttctcctatgaaaaagaaaagggccagacacagtggcacacggctgtaaccccagcactttgggaggctgaaagcgggaggattgcttgagcccaggagttttagaccaacctgggcaacaaagcaagatcttatctgtacaaacaaaccaacaaaaaaaaaaaaaaaaagaaaagaaaagaaaagaaataattgaccaggcagggtggtgcatgccttgtggtcccagctactccagaggctgaggcaggcggattgtttaagccccgggggtcaaggctacagtgagccatgatcacaccactgcactccagcctgggcaacacagcaagaacctgtctccaaaaaaaataaaaaataaaaataaagaaaagaaaaagaaaaggatggaagggtcaaagcacatactggccacagctatgttgaggaaacaatgacctcctgtccgtaagcatgcacaactttgtttatttttaatcatctctgttcttctggagagtaagtgcctcacattgaaagctttattatggaatcccatttctcattgatttacattctcctctctcatggctctgtgatcaacggggctgcgtcgtcagtgggcagcagctcaccatgcccccatctctcttcctattcctgcctcccacccctttaatttagtgagccataaacacttcagtccactgaaagagtattggtttaaaggggcctagagacaaagctcttttttgataaagggaagacctgctcttaagctttgaacttcacgttttcctatgttaaaactgtggtctcaggggcctagccccactgccctatgactgtggcctctggcctggtcccctggctatcacatgcctttaattccatctcgagctcctcacacatctcattctaatgtagctcttgccaaaggatccagcagagaggctgcttcccagagcatagagcccttggaagtaggagaaatggggatcactgaggtagagtagccggaaaaactgagtctcccttctcgggagtataaggcaagattggccaagccttggccaggttcctgaggtttgcctatgtccttagttctccagtattctacccaaggactgttcagagtctcctatgctgtggctcttcattcctagggaacgggtgtgaatttccatctgcaaaattagtgacttttttggtccacatgttaaaggttctcctctggcacatgcagctttgatttcagcttcaggtccccatttagccagaatggtggaagtgagccgccaccagccagttcaggtgggggtggggaggggaataaagtgcccaggggtggagacccaggtggggtgggatgggggcatctgccgcttgatgccatctgtgcacccagacatctgctaagacctccaccgtcccatctggccctcggccgtgagccacgcagattctgctgatttgccgttggggtcaggtggcttgctgcttcgaggctgtcccgtgcatatggaaataattccactgcccctcccatgtgggccttcagcaaactcatctcccagggcccagctcaaatgccatcttgccacagagccgcccagtgtttcccctttggagctattcttttgtagctaggagaccctcattggtgaaagcacttagcatgagctgtctcctggcagaatcctttgtgtaacgtctacctctgctgctaaaacaccgcctcctcagcgccagcaccagcccgtttcatatccctgctcccagaaccctgaatggattaaaagcatgggtgggaaaagtttgctgaattaaaatgcaaagaatgtccaaacacctgaagttggcaaaccccaagtctggcaggaaatcgcaaacaagctccgctggtctaaccactagttctccttggaaaaagagaaagtggacaagtttagctggctcctgggagagctatcttcattgatttggactgaccagggacaaggacataaaggcttcccaggtgaaatggcaagagttgcagaagggaagccttatccacctctgctcttccagcgtctggctgtagcacataggaaagccccagtaaagaactcctggataccttcaaccagagcagaagtgaaacacaaacccccagggaagtcccagactgaaggtccaggatcatgagatcctccaaggacaatgaggagacaacaatttagctggctcctgggagagctgtcctcgttgataaactgaaaagtcagggatgattttgtggatctcaggtggcacccaggtgggacccagggaggacctggaatgctcttggactccatgcctggaaggttctgttttcccatggagataggtttttccctttccatttaaccagaggctcaaaagaaagagcttagtgatactctgtgttcatttcaacaaatatgcattgagcattatgcccggccttaggctaggcgctgggaatacgatggtgagtggaagctgactggtggctgctctctcagaggctacagtgggacagggacataccatccgaagacttagcatcaaagaaatagcagagttataggctgtagaagttacaacagtaataaaaacaggcactgcaagagagaaagagagcgatgaggagcatgaagcttgtttacattgggtagtagaaaggcttcttcaaagaagtgccatttgagccgaaccatgcatgacaagaacgaaccagccagcggtgtgctagtaaatgtttgacagccatctcttcaaacaaacaaaagaatcaggtctgatttgcggagtttgccagtgtccatggtgtaaatgctcaccatggctaatttcaaactgtctctgtgatgtcatgctgatatcatgggaagagatgtgcacagtcagctctcatgagctggcataatgagttggcccgacactcactagagtgggccagacaaagctctagagagtgcgcagtccaggcagaggaaattgcacgtgcaaaggctgtgaggcaggaataagtatggtgcgttcaaggaacagagaggagaacatgacagcctccatcacaagcaaggggcagaaagggttatgctgaaagaaggccagatcacatagggcgttatgagccataggaaggacttatggtcaagaaagtctttgaaaacccgaaatggcaatgcctgtgtactaggatggcactgccagcaatatcatgggaaggaggaggacttgcccacgtcattcttgaaaatgtgctgtaactgatcacgaggtcaggagtttgagaccagcctggtcaacatgatgaaaccctgtctctactaaaaatacaaaaattagttggccatggtggtgtgcgcctgtaatcccagctactcaggagactgaggaggagaatcgcttgaacccgggaggtggaggttgcagtgagccgagatcacgccactgcactccagcctgggctacagaacaagactctgtcttaaaaaaaaaaaaaatagtcagaggctgtgctcactgctccagtttatttgttattctcccagtctctgatggagtgagtcattggtttactacttaagaaaatcaactgtttccacagggagaaaacaaatattgtagtgacaaatgtgtccacacacccaccttctgcttgaaaatgtcagtggcatggaagttgagcatgtatgcctctctcgtgtctaaaaaggcaatggtgtggcttgccagaggcgtccaggacacagaaaagactctggccagggtggcttccttgcagctgtgcagtctctattttaacagtcctggtcacggagccagaaaggatccagtgagaaagaagtgagagcaatagccacctcttagcatggaataagcccctctaggagttggataaaatggatccagatacattcttggatggttcttgtctcctggctctgctctcaatgggaaacttcaacacaattcagaggagcaatgtgagtgggcttcaaagggaagccttgctaaatgaagaagccggagaagatttcaattaagcctgcttagttctgtattggacatttcaaaagatgtggcccccaccatgctcattagtgatgagtgtataatgtaaaacatatgacattagtataattttttttctgagacaggaagtcgctctgtcacccaggctgcagtgcaatggcatgctcacagctcactgcacttaagcccaacctcctgggcttaagtgatcctcccacctcagcctcctgagtagctaggactgcaggcatgtgccaccatgcctggctaatttttaaaattgttattattcttagtagagattagttctcactatgtttcccaggctggtcgtgaactcctggactcaagctgtcgtcctgccttgacctcccaaagtgttgggattacaggcatgagccactgtgcccagcctagtataatttttaaaaacaagagcagtaccctgcacacactctccaccaggagtccacactcaaacaagagaggcacagagctgggtgccatggctcatgcctataatcgcagcactttggaggccaaggcaggtagatcacttgatcctaggagtttgagaccagcctgagcaacatggtaaaatcccatctctaccaatacagttttttagaaattagccaggtacagtgatgagcacctgtagtcccagctacttgggaggctgaggtgggaggattgcttgagcccaggaggtcgaggctgtagtgagctgtgattgcgccactgcattccagccagggtgacagagtgagaccctgtctcaaaacaaacaaacaaagccacaggaagaaggtggcacctgcccttccctgaccgtctcacactggctgcatttccttacgcacttcccctccacctcacctacatgtatctgtgcacaccccacctagcctctggtctcagtatctctgcctccctgattgtcagcataccctgtgtgtgtcccctctcattactggagcggaggcccctttccctacttgttgacgtgctaaagcacatcttcgcctctggtcctttctcatatgagtacatgggtctgctttctggttactcatcaccagtgctcagagtacaagccagaggacaagaggcaatgagtggggcagaggggctatgttctttgtttacatctcatttctctttgggtcttaagtttgctgttttgaaaaggccccatggcctgggcagctcaggaggttgaagaagcaaacctccgtgcaggagttctgaacttagaaaacttggatgggctctagggtttctggaaaatgctgatatttttgcaaaactgtgtgtgtgtgtgtgtgtgtgtgtgtgtgtgtgtgtgtggatttctctgtgaagagggtttgtggctttcaccatgtcctcaaagaggttttatggctttagcaattcgcaaaaaggttatcaaccaagtgccaagatcccctccaccaccaaacaagatgaaaacccaaaaactttgctcaggatctcagagcttcactgactctccatgaaaccccactcacaatccctgttttgttttttctcaaggcaggaattgggaacgtggtatgtatcgtgggtgatacacaatacacagagtatcgtgtatcgatagattagagttggtgatacaccgaactcaactcacagtcttcagtcttctgtctggtattctttttgagagtcacctggcggcaaaccattgtaattgaaatgtaacgtggccctttcgccatgctctgtgaaagtgtttaacgtgtgcctttggtctgtgcccaccttttagtatcaccgtcatttcttactgttttttctttcttcccctgaaaagtagaaaaacaggaattaatacctgagatctgtcctaacccactatccccctccattaaagaaattttgggggtaatttttggcttacgatgttctagaaactggctgtgctaagcacataggattttgtaaaaataatctgacagttaaagactattgtttattctcatgttacagataaggaaactgaggctttgagagggtaaaaattttcctaaggtcaggtggtatgtaaatagtagggcaaggatttgaattcaggtatatattgggtctttgagagtactccctgaaaactacaggttccttacactgcacacatcatggaggagattggtcaagagtaggttgaccaggctgggcgaggtggctcacacctgtactcccagctgatatggtttggtagtgtccccacccaaatctcatcttgaattgtagttcccataatccccatgggtcatgggagggaccaggtagagataattgaatcatgggagcagtttcctccatcctattctcataatactgagttagctctcacaagatctgatggttttataagaagcttcccccttcagtgggcagtcattcttcttctccctgctgccatgtgaagaaggacatgtttgcttccccttctgccatgattgtcagtttcctgaggcctcccagccatgctgaactgtgagtcaattaaatctttttcttttataaattacccagtctcaggtatgtctttattagcagcatgagaatggactaatacaccagtgctttgggaggcgtaggcaggaagatcacttggggccaggagttggagaccagcctggaccacatagtgagactctgtctctacaaaagcacaataaaaattagccaggcatggtggcacacacctgtagtcccagctactcaggaggccaaaccagaggagttgttgagcccaggaggtcaaggctgcagtgagttgtgatggcgtcgctgcgcttcagcctggggcaactccagcctgtgagactttgtctctaaaaaaatgaaaaataaaaaagaatagattgaccagtccttcagagaaaaggaagcaaaagggccaggagaatgtggcttacatatgagagtcaactgggcttttctcctaccaagtccaggattagacagactcacccacccagcgtcagctcttggaggagcaagaaggcagcagaagaaagtagtaggctatgaatctcttgttccaaacttatccttcaagtaagtccctctacctcccctgggatggagtggaaatagtaaggagagacacctagaagactgtaccaacagacggtcctctctgtgaaaggaaatatcaagaatagggaagaagtgtctcccattcaaggggattttgttacccaaccataaggatcctgttatgcaggggctctgcagtacacagtccccatggacaaacttctagaccttccatcataccatgaggtcaaatataacatctctggaagggacaaaatgagccaggccaatttggaatgccattggtgtcaccaaaacccagcattatcacaggatccactgtgtgcgttagaaaaattgagttatttttctgtataaccaaaatgtgtgcccagggggcacagaggagtgacttgactcacaccttgtaggaagctggtgtggaccttggctctcagggatgacctgtcaggccactctgagtgacagatctaaggcttcatactctctaggacaggccgtgtggacatgacatcacgggcttcagggatgaagtctccacgtcctgcatctggacgtcttttccatttactcctcccagatcctctttctacccttgtgttctgctccctgccacaggagggaacctgtacaaatgacatcggggttcagccagtgcagagacatggcaggagggcaggaggaagaggagagtgaggtcaagttacccattgccctggctccttccctgtgttgtggtcagggactgctggctatgtctctccaccagagctttctgcaaggcagccttctctgtataaccctttccttggttttccttctaggtgcataggtggacagtgtttatagcccccagttagtgcactatctagccacatggtttctatattagtcatttgccataacaaaacaccacagaccaggtggcaaaccacagaaattcattttctcccagttccggaggctgaaggtccaagatcaaggtgccagaagggttggtttctctgtatgcctctctccttagctggcagatggcctccctcttgctgcctcttcccatggtatgcatatgtgcacactcatcccaggtgtctcttcctctacttattaggacatcagtcagattggattacagccccaccctcacagcctcattttaacttaattacctctttaaaggccttatgtccaagagagaactgttatacactgttggtatgaatgtaaactagtataactactatggagaacagtatggaggttcctccaaaaactacaactagaaccaccgtatgatccagcaatcctactactggacattgatccaaaggaaaggaaatcagtatatcaaagagacacctgcacccccatgtttattgcagtactattcccaataaccaagatatggaatcaacctaggtgttcaacagcagatgaatgaacaaggaaaatgtggtgtatatacataatggaatactattcagccataaaaagaatgaaatcctgccattagaggctacatgggtggaactggaggacattatgttaagtgaaacaagccaggaactgagagttaaacaccacatgttctcactcatgtgtggaagctaaaaaagtttatctaaaaaagtgaaacagaggatgctagaggcagagaaggggagtagggaaggaggcatggggaggcatttgttaaagactacaaagttacagctaaatagaaaaggaataccttctagcgttctataccagggttctccaactcccggggccacagactggtaccagtccatggcctgttaagaaccctggccacacagcaggaggtgagtggcaggtgggcaagtgaatgaaacttcatctgtatttacagccactccccatggctcacattaccacctgagctccgcctcctggagctcaggatcatcagcagcattcgatttgcataggaatgtgaaccctcttgtgaactgtgcatgcaagggatctaggttgtgagctccttaggagaattgagaatctaatgcccgatgatctgtcactgattcccatcaccctcagatgggaccatctagttgtaagaaaacaagctcagggctcccattgattctatattatggtgacttgtataattatttcattatatattacaatataataataataaagtgcacaataaatataatgtacttgaatcatccccaaaccatccccccaccccgccaatctggggaaaacctgtcttccatgaaaccagttcctggtgccaaaaacgttggggaccgctgttctgcaccactgtaggatgactatagtttacaataatatattatacagtgtcaaatagctagaaagaagacattgaatgttcccaacacaaaaaaaaaataaagatttgagatgatggatatgctaattactctgatctgatcactatacattatatgtatcaaaacatcactatgtaccccttaaatatgcacaattattgtgtgtcaacttttaaaatgaaattaaattattttttaaaagacgttacttcaaaatatggttacagttggaggtactgagggttgggacttgaacatatgaatctggggggaaaggagacacactcagcacataacagtttctccacaccttttagtaagcactttatcctcatttgaatgtgccatctgtttcctgctgcctgactgacaaaggaaaccctttgagctgtttctcttgtagagatgtatactaaattgcctactttcacccacctccccgccaccccaccaggaactggaggatggtgtgtaatttgggctgaatcgtctgtagagtcatcatatccgtatttagatgaaatcttcactctcagcctctctttgttaccatgctcttgtctcccggaaacttcagaggccacagatggcttggtgtattctaaagtctagttctccttccctaatggtttcaacctgtgtgtgttggcattcgaaaacctttgcctgggtgtcaccaggttaggatcaatgtgtaaaatggattttcagtacaactgagggtgcaaactatgacggtgaggtctgctgggtggcattgtgtcagcacagggcatggatcaccaaaggtgggaggggacatgctggcttctctgaaccaggtgaggatgctgcatttggaggtaataaatgcgtgagaggataaaggcaataacagatccactccaaccacggcacctagtgaagggccagagagtggcctttctgtcacaataaccagagatgtagtatcttctcaagtgtgggaaaccactgtcctgtcccgagagctgcaccaagctgggagtttctctccggccatcaactttcttgtcttaaaaggtctctttctggaattctccagagtcatttgctggtggtgtggctcttcctttaaaatctttatttcctttcatttcccaacgtactctccagctcaccctgtaatgctacagaggagcccggggatttctttagcgttttgaagtccttggctgccattttggttgcttgaagattttgctccaagacccactgctctgcatatttgtttgtttgtcgtgtcagtcatcaggaaacctagaccatatgtttctgactcatttacgccgaagtcatcaaacaacacttggagtagttgttttaagtccataaaggttttacatccttaggtttcatttctcggcactcttctttaattaaatataatttatccagcgtttaccaatgctacatgccaagcactgcactggctctggaagtgcagaaaagaataaaacacagatccttccttcacggagtttgcagcatgaatcacccggccaagcattaatgagattaaaccagaacggtaagaaagtgttcattttgaaatcccaggtctgtgagtttgagcagtttctagatctagccagggtgacaccggccttctcctcactggctcggcttttggattttcctcttcccagaggtggatactttagtgatgcacccataaagtcttgattcactccgtttgaagccttttttaccctgatggacctggctgtgcctttccatggatgaggaaatccattgctcccctggagagcccaagtttgcatggatgccagaggtgtggttggaatcaggacttttcactctgaagttccagtaaggagaactcagaggtgattaacaggaacaagtgatattttgcactgctgattctatttcacaatctcagatgctaatcctcgccaaggagccgatttaaatcccagtctcttcagcacctgttaatttcaccaaagcacaaaaaaaacttttttctagatacgggggcaatattaggattttgttttcctaagtggttcccatggacttttcttttcttcctaactgtgccaagtattaagaattgcatgaggttgacatcagagagttttcacacagtctttggacagagctacacaaaggtactttttaagcctcagtcagtggcatacagaggcccacagctctgcttacacatggtggcatgaacagccccggcttcagatccctgagtagcacaatgcaatcaagagcagctaattctcaccctttggcatctctttttgcttgagtattcagctggtagcagccagcaaggattgtttattaaagattttattttggccctgcagtgttgggttatatgcagactgtcacctgattttggtttatcgttttgtttgccctcatcaggtccttgagtttagagatactttttgagctttaaaataagcaagtccatgagtggtctcaatgaccaggactgtgttttatttcctcctttcctcagagtccctggcttggctcctaggaggtgcatggtacctgttggatgatgatggtgatgacaaagacaatgagggcagataccacggttttcatgcttagtacccaccaggcatggtgctaggtgacacacctgcgtctgctcactgcatcctcaccaccaccctaacggcacagatgaatcggaggcacgaagcctttgttatttccccaaaggcacacaccagcaaatagagagctgagatccaaacccctgtgagtctcactccggagcccaaactcttggcttgaattctagaatgaaaaacccaattaataaagtgcaaaatgtttgtctttccagttacgtgtcttccctatccaaaggcatttagaaggaagaattcagcaaaacagcttttgtgagttagtgaagcctccacaaatgttgaactcctgagtctcggtcaagaaaaacttaagactgaaaattccaatgaggcagctctgaagagatggttctcagcctgccagtggcccagaagaaccttccagaaagactaaagtgccctctaagaaggaccaagtgcttctgcaggaagtaaactctgtgccaagcagacggtccacctaggaaagcttttcggttggctcagcagagaaaaccagggctggtcttccttcagcaagttggtcatcttcacaccaactctcctgtgagaggccactgctccaggatacagtatgaagagtgggcgtagttgagggatggtatgaactcatgttgttcctgtcctccccatctaaggggagacaaatgacacctgaggtcagcaggaaagtgagctcacctgtgtgagtgtcaccaggtgccttttcttatgaacatttcctactaactgagatcaggttttctgctctgcaattcacagatgaggaaaacaaggcccagagaggttaagatacttacccaaagtaaacagagaataagaggtggaatgagagcatcattcaagggaagtttctggtcttcacagtatccctgctgtgtctgagatcacgtgtcatacgccgtcacataattcccgtccactgatgtatgccacaccccaggcttcaaagagaacgtgctggacactgcctctgccctggtggaattcatattcaagaggagaaacagataataaacaatgaacattgcaggatgaatgcctgatttacaactgcagtaagcgccaaacagaaaggctggtctctgagagcatcttcagaatttacccatttcccccaactccattgctacttcccttcttccagccaccatcaaccctctcctggattctcaaagctgccccgtgctggtcttcctgcttctcctctggccagccagagggatcttttaaactgtaaatcagatgacatcactgtactgctcaaaacctcccagaggctccctctcagagaaaaggccgatgtcctaccgtggcacgtggggccctaaaggccctccagcttctcaccagcctcacctctccctcctcaacatccctctcaccactgcgttagagcttagccataccagctcctatatactattcctgcacactccaccctgggtcccacctcagggcctttgcactagctgttccatctttcagggctctctccccaccccccggtaccagcatggattgatcctcacttcctgcagggttctgaaggggagagtcctttttccattgccccagccctcgctgtctccctttccctgcttcatttgtcccacagcagtgatcagcatttgaccttttgtgtatttgttgatgtctgtcttcctccagtggaatgaaagttctgggacagcgaggtcttggtctattgtatgttctgctctattcccaggactgggaacagtgcctggcatatagtagaaccttaataaataattattgaggggggctgggtacagtagctcacatctgtaatcccagcacttagggaggccaaggtgggaggatcacttgaggccaggagttcaagaccagcctgggcaacatggcaagataccactatctccacaaaaaaattaaaaaacaaaaatagctgggcatggtggtgtgtgcttgtagacccagctacttgggagactgatgcaggaggctcacttgagcccaggagttggaggctgcagtgagccatgatggcaccactgccctccagcctgggggacaaagccagaccttgtctctattttcgaaaagaagtattattgaaggaatgagccaggcatggcagcatgcacctgtagtcccagccacttgggaggctgaggcagcaggatcacttgagtccaggagttcgagaccaacctgggcaatatagaaagactctgtttccaaaaaaaaaaaaaaaattgagggaataggtgtgtaattgagggccacatttggtttggggatggtcacatttcgtttggggatgacagttgatttctctgggagaagaaaggcacgacacgcaggttctagcatggttccccacgcccttccgctggtgttcacatccttgtgtagtcccttcctttgggtggggtgggacctgtgatgtcacttccaagattaggttatgaaggacagtgattgctgtcttgctagtgcactctctccccatctctcacttgctcccgtcgatgaagcagtgtgccatgttgtgagccactaagaggcccacacagtaaggaactggggtggtcaacagtctgcaaggaagtgagttctgccagccttcaggtcagtgagcttggaagcagatcctcttccgcatggagccgtgctgtgacggcagccacagctgacaccttgcagcctgtgagagaccccgggacaaaggactcagagggcccaaaagtctgcgaccagatcctggtgcacagaaactgtgagacactcagtgttgcctcaagccattaggaccgggacagcttgttacacgcagtagataactaatacaggagaggttccggccatggggagctgcattctgagtacagaaggagcatggtgcaggcaattgaaaaggcaaagaagccagaaacctggagcttcacgagcaaggggaagaagagtaggggataaggggagaaagggttttaggggccaggtgctggatttggggtttaacctaaaagctaatagaagccaccaaagggttgaagcaggtagcagggaggcagtctctaatttgcatgttgcatttaaaagatcaccctggacaccatacagagaagagattagaagggcagaaggagcagggagacaggaggctgtgagattcatctgtgcctgagatgcagatggcctggtccagggtgctggcagtggtagccagggagagggagatagcaggaagctgatcctcaggttccaacagtccttgtctgtgttttggctcaaaccccaggccactgagatgctgtgtgggttcaggttgatgccaacaatgccgaaattacaccattctcatcacagaagttttcgatgctttctgaaaagcaggagtgctaaccctatctgactagagagaaaaccaggccctgggaaatagagcattttgcaatcatttgagacccctccgatctgccagaagcccatgctctggaagctgcacacttcatttcatgaaaggtcactctaggctctccttggccccagtccctgacagttgctaaatcatctattattacccgaaaaaccaaagctgagcctccacagggaaagaaacaatgaaagtcaaaagttgggggcagaaaccgctcagacctgggcaggctggaacattcccctagtgcaagccataggtaaaaaccaaccacagcagctatagaattaatactgtcttctcaccccccaccttttccctgtgctttctcacacaccacaataaagagcatctgtgttttcccagccctcgtggtgcgaagtatgctccaagatgacacattccctatagatgctcatgtatcagttgttttttaatgccgcactgctgtgtaacaaacaaccacaagccctcagtggcatagacagtgagtacacaatgctcctatgtctgggtggtcagggggccactctaatctggactgagcctgctcaatacctgtgggtcatctggctacctgctggggtgactggggccaccaggctctgctctgtgtgtctctcctccttcattacgctagcacaggcttgttttcatggtgatcctgaggtgcaagagaggacaagcttaattgcacaagcgctttttcaagcctctgcttgttccatgggtgctagcatctcattggccaaagcaagtcatgtggccacgtccaggtgtgaagaactgggggccttttgcaatgctcctggtagacacaggcacctgatgatctcagatctttaacagcacaatcatttcagtgctgatcactgtcatttacggagctggcactgtgcctggttagtttactttaactcaatggctcccagtggggggtgattttgtcccccaggagacatctggagatatttttggttatcacaactgaatggggaagatgcttctggcatagggtgggtagaggccacggttgctgctaaacactcttcagtacagaggacggccctcacagcaaagacttacctggccccaagtgtcagtattgccaaggctagccgagtacagtggcttatgcctgtaatcctagtattttgggaggccgagataggagggtcatggagccaaggagtacgagactagcctacacaacaaaacgagacctcatctctacaaaaaaaaaaaaaaaaaaaaaaaaagaaagaataattaggtgtggtgatgcacagctgtggtcccagctgtttgaggggccgagcggggaggatcgcttgagcccaggagatggagattgcagtgagccatgaccacaccactgcactccagcccgggcaacagagcgagatcctgtctcaagaaacaaaagaaagaaagaaaaataatattgccaaggttgagaacccatgcattaatttgataaatcctgacacccaccctgtgaagtttcattagatccatttttactaattttttcctttcttagccacataactgggtcttgctctctgggctgactgatggagactgcctgtggtttgggtgcaggtccctgcagtctggttaccatcatactggttccattttgttcctgccacctggtccacctcccaggtagtggctgacactcccctctgcctggatccttgatggacaaatcccttctcaagaggcatctgatgataccctcttcggagcaggtgaagagtattagagtatccttgttctcaattagctggataattggctctgcacggaatttctcactggctgtgttggagaggcattattaaagaaacccaaagcaaagaaaaaaaaaatccctaagcagccagtatgtttgcatggcctcctggtctaccctggaacctctaggcaagtgtgcagcataattaaggcggaagtccacgtgggggccctgggttgggaatgtttgtggagagagcagacacctgctctgctaatgcgttgctcttccccacttcaagcaatcctgtcctcttgtgagctgctcctgaaggctgtcatggtccttaaggaagctgctggacataagaacagctgctgatcccaggcacaggcagcatacctgctctgtgctcttcctgtgaggaagagagagatgtggataggtcttggttttcacactttggggatgaaaagacagtatttttcttttttctttttcttttttttttgtttttttttttttttgagacaggttcttgctctgtcgttcaggctggagtgcagtggcacaatcacagttcaccgcagccttgacttcccagactcaagtgatcctcctgcctcagcctcccaagtagctggaactataggcacacaccatcatgcccaactaattttttttttcttttagtagagacgaggtttcactatgttgcccaggctggtctcaaactcctcagcttagcaatcctcccacctcggcctcccagagtgctgggaccacaggcacttgccaccatacccggctaacttgtttattttttgtaagagacagggtctcactctgttgcccaggctggtctcaaattcctggactcaagggatcctcccaccttggctgagacgccctggctagtgtgtgatctgccaccttgcagggccctaacagtgcagccccagaatagtggctggaaaaggccaaaggcttagggcaggttgctcttgaacttcaccatatgcttgtctcaaggggccccatcccagcctgatgggaggggctgggtccttgcctatagtgctttaccttcacgagggaggttggccaagtttacaaaatgaggtgacacttggcaccaaagaatggcacagcctggcagcgaagctgtttcctccattcgcagcagagctgttggaagccggcagcgcacacatcatcctcagaagggactcctccaaaacctcagcgctccgaaaacaggctgcgtgtgtagcttgatgttcgggggctggcagatgagccagtaatggatgtttcctatcctgagagcacatttttctccgaggaccatatcacctcttagggcctaatacaggttgatatttttcctttaccctgaaagtctctgcagcaaatgtgcagtcagaaccatttttctgattgaactaaaagtatcgcagcttcattttcttttccctttgggttaagtcggtatttaaaaggcctctccgaagagtgaaactatctctaatttagaaagctccaaatctccatcacagagacgcaggccgcggtggttgacaaggttccgggctcttgtttctaaacattgaagccatctctacacttaaaatggacgctggagtgtttctaaggatgggggtgaaagcggtgcaactgaaggtctttaatcaactgtggtcagcaaataaaaggaagtgacatttcccttgaaatattgaaaggcttggatttcttcatcagaagtgttttaagagcaaactctcaggttcattcaagtggggcactgccttccaaatgccaatatccactacttaagtgcagagaaaaatgtgtatatatgtgcatgtgtatgtatgtacacgtgtgtgtgtgtgtcagtgtgtgtgcattggaagggcttctcagcttcccacccaggagtctctgtttgcaaaataagtgtgtaggtcatgattatttcacatttaaattaatggaagtggatttctctagacatttatcgttcaggcaatgcagcgttctctccaaaatccctgctgcctaagtagaaatttttcaagtcatcttcagctctttcctctccctcacttgagggcatgcagtcagttgagcagattttcttcccctttccaatcttttttcacatctgtctgtttcattccgttcccactgccgcccagaaatcaggccctcataatccttcccttggaccattgcagtaacctccctgtcggcagccttgtgctctaatccatcctggattcagctgctagatgaattctctggcggcaactctctgagcaggtagctcttgtcatcaaagcccactgctcagccctcaggcggagcacctgaaaggctggcatttcaccatgtgcctgagccgtcctttcctgtgttccctgctgtccctagttaacctacatcctcccctctagggccctgctctgcaaactgtgctctgtgaatcctctgcaatcccagacatggctctagccaccacagttactgacccacttggttttgttaaatccatttaccagtcaaagtttctatgtcagtgtttgtcaaagaagagggtgccactgccgggggaatgttccctggcagttcccttggagcatcttatgctttctggcctctgagacttgactcacagcagtcccgccctctggaatgccttctcctccagccctgcccttcaaggcccagctgggaggctcccttgcccatggagggagaggtaacatccttggacacctggccagatgtgagcgctctctcccctaggcatctctgatttatctgtgtcgtccttggatgtgcatgcttgcagcctacagcattattgtctcataacctcccactcccccctactcactggatgtggactctgtaggcacagggattcgtgtgttcatctcatgtgtccattcaacaaccatgtaccctggcatgagctttcccataccaggtgctgggaatgtgttgatgaacgagaaagacacatctctaccctcatggattctgtattctagctggaaagagggtctggaggccagaagtccaaaatcaaggtattaggagggcgatgcttcctccaaaacctctagaggaggctccttccttccttttcccagcttgcggtggccccggcattccttggctgtggcagcatccgatctctgcccctatcttctgtggccccctccctgtgtgtctctgtgtcctttttcctgtctcatagaagaacacgcccattggatttctggcccattctaatccagcatgatctcatcttgacctttaccttaattatatctgcaaggacccttaagccaaataaggttccgaggttcagagtggacatgaatttggggctgacatgaaagtggaacctgaggcccaagaggcccctggggctgacacccctgtggggctgacatggaaggggaaactgaggcccaagagggcagtttgtcctggacctcacagctgggcttggccaaaaaaaggtcgggccttgatgcaatgtggatgcgcttccactgcacaccgacccccacccctgctgcacccgaaatccaagtttgatggctaccatcttgcctgctgttcccagcctgctctctttggttcagaatacaaggagaacagaacctggtcagaggccatcaagagggacgcttcccccattgagcctggcctctatcacctgtggtgactggggtagcaccgccaaagaccgccggcattggctgctggtcaccagcggcagggcaagcacaaagaagcaaattacccccagggagtctgattcctgtccagtcgcattttcgatgtgcttcatgctctctcttccagctgtttgcaccaccacttcaaatggttgattctgttgctctgtaaagaaaatgtcgctcatttccgttaagtgcccatctccctggtttatgttgccaccacatttgtcctcccgcttgatgtgaattcaaaccgtggtaggcggtgtgccctcgggactccactcagcattttgtatggccccttaatcacctgcttttcagagagtacagaccagatttcccccaacctggcatgtggacgtccttgcggggacttttccattttggagggtttccgcatatcacaatatcctttttgtaataaaaggaagagaattgctgacaattttcacaaatttaggctcttgcgagaataattttctctgaattatgtgtgattctcctttttatgtgtccctaacatttagtttgcttttggtgcagccgctaagctgactgttaaatatttgtctctcctgccacttggtcttcaagctgtaggtgtttagcacacgcgggcagtgccaaggacctcacatggcgaatgtcactggccttctggatccccacaaaccagaagcagtgaaggaggagacagaactggggtttaatttaactcctaaactactgaatccgcaccctttcctttctgcttttatcttagggctacgtggagggctggatccttaggggacatcatgaaagcaagaaccaccccactccgccccagttgcgcctgttaggatgggttggttggttgacatgacataaaaagagaaggtagggggtttgaggtcaacatttttcaacttcacagtctgagttgagggctgggattgtctgagtctctaagggtgcaggcttggtttccaagaacagcgggaacctggtgtggctcccatcataatctacccacagtcgccataggaccaacccacactcaactttgcacatgtactctctgcttgctggtctttccacagactcagcttctgcaaggcagggatgatgcccagcatacaaggtagtaggcaatgaataaatcttggtcaaattaataaaataataaccaattttgattatgattattcagttataggttcatgaccatagtcaacacatttacgctgagtgcatagcatgtgtcaggcacctatgtttgatgttggggacatggcaggaaatagagcaggcaaaagcccttgccctcatggggcttagattctagacaaagaatttaggccatagaatgcaaaagtggactgtgtccagtggtctgttagaaggctaccagtgctatggagaaacaggaggaaaagaagatgggagggagtgtaattttaaggacagtggttagggtgagactctttgagaggtgatatttgagcaaaaatgagaaagaagccaggcgtggtggctcacacttgtaatccgagcactttgggaggccaaggcgggcggatcacctgaggtcaggagtttgagactaacctggccaacatggtgaaactttgtctctactaaaaatacaaaaattagctgggtgtggtggcacacacctgtaatcccagctacttgggaggctgaggcaggagaatcacttgaacccaggaggtggaggttgcggtgagccaagatcacgccattgcactccagcctaggcaaaagagtgagactctgtttaagaaaacataatgagaaaaaagggagagaaacatgcaggtgctgggaagggcattctaggcagagggaatggccagtgcaaaggccctacagcatgtttggaaaacaacaggggaattagaggaaatggagtggagtggacaagagggagaggcagggacaggagggcagcaagctaacaagccaccttctccaccctgtgtagatgacacagctaatgctcaggggatttaagggacacgtctcaagccagccagcaaatgaatgggagagcagagcccaggcctgggattccggagcttgtgccacttgtcaacatgacaagaggacccactgggggatggcacttcttgtgaatgccacccttagcgcctacttggtgcagctttaacttggagaaagaaagatcccattccccttccttgctgttgagaacatagtcatggggcaagactgggcagcccccttatttcagtctgagctatccttggggttcccagcaagatcccaaatacctccaagtccctaatgcgtctttcttggttgtcaaatgccaccgtgagtctgattcctttctgtgtttttcgttcttgccccaaaaggttcttgtctccttctgaaacctgcctcatggaggccaggaataaatttaatttagggcatctacctgtgcagtcagtaaattacttctgctagctcgctctgacaaaccatcttctgtcgctgacctttcctgcctcatattcttgcaatatttttctttgcttaactttctgtgcaatcttcttttccatttcccatctttgctcctcttatcattcttacagactgcccttcgctcacatcggcaggctttcctgttttcatttgctgcttcctcgtcactttttcttttttgagatggagtctcactctgtcgcccaggctggagtgcagtggcaggatcttggctcactgcaacgtctgcctaccaggttcaagtgattctcccgcctcagcctcccgagtacctgggactactaccgcgcctgaccttccttgccactttccaaggcatttttttctgctgcctccccagtgagtgtgggtggagaccctccagcctgtttgccatcaggtgacctgatgaccagttctggcttggcccctgcccttgtttgtaccctgtatacagagtcaggcatttcttcttgcaaagagcactatctatttagggtgctctgggccacaggaggcctgagcggtggtattgatgctgcctctaacagagaaccatgaagccctgttgatgtggcttggcagtgtccccacctaaatctcgtcttgaattgtggttcccataatccccacatgtcatgggagggacccaatgggaggtaattgaatcatgggggtggttacctccatgctattctcgtgcttgtgagtgagttctcacgagatctggtggttttatcagaggcttttccctaccttcagtctgcacttcttcttgctgctgccatgtgaagaaggacatgtttgcttccccttctgccatcattataagtttcctgaggcctccccagccatgctggactgtgagtcaattaaatctctttcctttataaattactgagtttcaggtatgtccttattagtagcatgagaacagacgaatagacctgtgcaactgtgaaactggccagacaagaaccttgaaggcagccttgttcgtgttcgaggtctggttgtgttgagtatttacctcaaggatgacatttcaatgctgagagcaggggtacaagtcagtactatccatttgaaaggtatcttggtgatgtcttttcagatttccaacacatttctgggttttcaaaactaagcaggttctgcagagatttctatataagaccacctagtgcagcattgtttattgtaaggcaaattgaaatcctaattgtcaatcaacccctcagctctttgaactggataaataagtagaaatacatatactctgggatactgtgaggttgttaaaaatggtaaggaatagaccgggtgcggtggctcacacctgtgatcccagcactttgggaggctgaggcaagtgaataacttgaggtcagaagatcgagaccagcctggccaacatggtgaaacccccttctctactaaaaatataaaaattagccaggcatggtggtgcatgcctgtaatctcagctacttgggaggctgaggtagaattgcttgaacccaggaggcggaggttgcagtgagctgagactgcaccactgcactcagcctaagcgtcagagtgagactctgtctcaaaaaaaaaaaagaataaaaaataaaaaatggtgaggattgatccacatggacatggagagatgaccaggaaacagttacatttaagcaaatttccatgtgcgttttagtatgtgatgatccattttgtagaataaaattatatatccatcacagggcaaatgtgatattgttattaaaagaaattaggtgcttcacaaatcttaaacattacagcattctcaggtcattaagttattataatattctatctaattaacataaaaaattcaatttaaaacccagaagaagaacatcattcagggtcaaggtttgtttgttggatgagaagaaatatacattcgttataaccgtgttttgttttcaataaatatgaaaaagtattcctttcaaaacattgcactctggattggtgatgttcttttcccaatgagcatacctttgtaaaataaaatttactttactttgtctattacttggtatctctctgtctcttttacttttgattgtggagaatttcaaacatgcagggaagtcagcagcccagtaaaatgaatgccctcgtggcctatggtctcaataaccatcaacccttggccagtcttgccctatccacacctagattcccttccccagcccctgttcctacgtgagtttgaagcaaatcccaggcatcatttaaacacctccatttagctgggtgccatgactcatgcctgtaatcccaaccctttgggagactgaggtgggagggtcatttgaagagtttgagaccagcctgggcaacacagtgagacctcatctctacaaaaaatttttttaaaaacttagctggacgtggtggtgtgcacctgtgtttccagctgcttgggaggctgaggcagtaggatcacttgagcccgggaagtcgaggctgccctgagctgtgatcgtaccactgcactctggtctgggtgacagagtgagactctgtctcaaaataaataaatacataaaaataaaatctccatttcctcctcctgaccctgcggctgcaccatagtcaaggggtgcatcttccaatgttgacctattgcaaagagatcctaatcctgactcccagaccttctacctgctgtctgcccccacactgtccccagaaaggtcttcttacagcctaatctgagccctaccttaactgaagccatcagagccccccaactgtgacagtggaccaagcaggcaaagcaggagtgccaagatatcaaagtcctcaggtcccggggcagcaatgagtgggacctggggtggcctgagcttgctcatcacggcctgtggcctcatcgagactcatgagtttaacacgagggagcagtacaaagatgatcacatgcctctatggccacgatggggaatgaggaagaggtactggaacattggaactctactgcctgggacaaaaggcccttcacagttggctgtccatctgccgggctcagcatccatttgctccctctctctcctgcattcgtctccttttccacccgagtgctcctgtgggtaaacatcagtggggtggaagtgggagtgcagtgactcaaaaccacgtcggagtgtggctcctgatcccaaaagctagttttcctgggatacggctttgactgatccagagggtttattcagccagtttttcaatagatactttactgggcacctcctatttcccagacactgttgtgggcactgggaacccagaggtgatgaaaagagacaaaacccctgccctcatgaagtttctgtccacacatgagcgtggacagatgcctgcaatgacgtccaccgaatatggcagaattggggaccagctctgtactttcagcttcgtaattttctgcattcgttgatttatttaaaaggagtacgtttcatttttacaacaacaacgtgatttttcttaaaagccacaaacaaagaaagcacacagggcaagatgctaccagtgattaattccgggtggcgagcaggtgcacaattattttcttattctttcatgcgctttttaaaatcccccaaccaattttttgaattaaagggaataaaaacaggatagggaaaaaaaaagtgaattctttgaaactggcagtgaatctgccacaaagtcaggaatgatggaaagattttttcttcttattctctgcacagtaaccacaatatcgatgcctcactccagggcacagatgcgtctgcgggagagctgggattagagtccccttgcactgtggggctttctctaaaccaccttttttgtggccttaattccatgaatacaaacaataattaccaacctaagtagattactcagcatagcttacatgcctctgggtcctcgaatgagtcacattattgactgctcacaattaatctaaaaaattaaaccaattgctctcctggttccttctccgttttgtgcctggatgacactgccaccaatttattgcctgagctgttattcctacttggtgttcccatttttctccagaactgaaatgttccattaaaactcatttgtttccaacctgggtcttttggagtgtgttccccatcccttctgcgggttgccccgttggctttgatgggctgcggtggaattgagcctctatttataattcttccatggtctgtctggtttttcaattacttcacaaactcccttctgcccttcctcactctggttcatcaattttcacttcccctgtcaagtcggaaagaagtcagtgctactgcgtgcacctcccagcatcccaagtatgagtcaatgggaagaaaatgaccaggaaacttgaggagacagaaaaaggcactcagaagtaccaggcacataagagatggttgtgaaaaatcggtgtaaacaggacttcgaccttcattcctcttgtaatttaccagaggaaagaagatcaccatacactgaattttaactcaggggccattggggctgatttgttacatagctataactaactaatacatattccctctcactcactgggtgcctcctgtgtgccaagtattctcatttcaaatgttatcaccagtctggaatattcttctccctcctcactcaccttcatctactcttcattgcgtcaatgcagacatcacttcatcagggcagcctacctgggaccccctccttaggctcctggtggcattctctacctctcctttgtgacatttaccactgttgtcatctgacatttatttgtgtaattctttattcattattcattattccactgactaaccataagtttcatgagggtggagctgtctttttttttttttctttctttctccttttatatctcctgtccctctcatggttcccagcatatagcagacactaaaatatccattcaggaataaatgtaagccttataacagccatgttatcactgttccccttttacaggtgaggaaacagaggctaagagtgcaggagggtgttgcccacgttcattgcccagtgaggttgagtcgggactcaaactcagaaccccagagtcccaatttttcctggttgctttccccaatacagtcaacctgagcctcccttagctcagctcttaaagtgctgtcaaagccacctggggatcttgtgaaatgcagatcctggttcaataggtctggggtggctgagcctctgcaagtctagcaggtttcctgtgatgctgatgttgccagtccctggaccaccctttgagtagcagaagggaggccctgctaattaggggagggaagcggatgggctcaaagccactgaatagcgtcatgggttgcatctaggttgcactaaacactgttatctcttggcttcagttctgctcccaaactgtgaatgtctgtgttggtgacagtttacacattcaagccagtcagaggttggggaggagtcctgatgccagcctcacctcatctggcactggctctgtgaatgaggcttcagatgctttggttctgcaggaaaggccaccaacagggattccaaaagggcctatgacaagcccttgtgtggaggtatccaggctcttgccaaggaagcagctcccaggtgggcacagacagctggtgcttgggagaagcagatgtacaccccgcaaaacaaccaggagaatcagagcacacaggggacctgtgcaagctgatagaggctctggtcaccaggggcgactaattgtccctgttccccaccagaaggaagcgtcccctgggagacgcgttcccagcatctcagcaggtgtggagcggcttccgggtgtgtgctctcccccagggatccaggtgggtcatccatgcttccctcagtcttgattttctttgcagagcctgtccaaagtcatccttcctcgagtgtctgtgggctgggttgggttgtacaaagacctttcaaagctgcaagccctgcaaagattatggtgtcccctacatagaacaacaacaaaagcgatgaatacttaggtagcaatgaattgcaattcctagaaggtcagacactggcttaactatctacctgtacttgtagttctcaaagcaggctccccagaccggcaacatctgcatccccggggaacttgagagacatgcagattctcaggccccgccccagacctgctgaatcagaaactctgggaatctgtattgcaacacgccctccaggtgcctctcatgcacgctcagctttgagaacctgtattaactcactgaatcttgaagacagccctgttaggtacaaagaggtgaagctacctgtccaaggccatccctctgtggtgatgccaacactcagacacaggcacctggctccagaagctgtgccttgagctactgcttgcactttgacaagtgctcagtggaaaccataacacctgaatgaggatgtcaaagaaattacattttttcctatgatgtctcttttgaggtttttaaatatatatatatggagagagaaagaatattgaattttccccgaaaaagtgtttttctctcttgctcatgttcagtacatctgttggataacccagcactgggcagggagatgcagatgcggaggagaacaaaacaggccttggacgtgaacccagggcttcctgaatcaggatgcttgccagtgtccccggcccctcctgatgaattagttcagcggtccccaaccttcttggcaccagggatgggtttcattgaagacaatttttccatggacagaggccaagtggaggatggttttggggtgattcaagtccatcacatttattgtgcactttcttttttttttttttttttttttttttttttttttttttttttttttgagaaagagttttgctcttgttgtccaggctgcagtgcaatggcacgatctcggcacactgcaacctctgcttcctgggttcaagcgattctcctgcctcagcctcccaagtagcatgcaccaccacgcctggctaattttgtatttttagtagagacagggtttctccatgttggtcaggctggtctcgaactcccgacctgaggtaatccgcccaccacggcctccctaagtgttgggattacaggcgtgagccaccgcttcggctgtgtattttatttctatcattgcatcgtaatatgtaatgaaataatggtacaactcaccattgtgtagaattcgtgggagccctgagcttgttttcctgcaactagacagtctcatcgagtggtgatgggagatagcaacagatcatcaggcactggattctcctaaggaatcagcaatttagatccctcatatgcgcagttcgcaatagggtttgcgctcctatgagaatctaatgctggccgggcgcggtgcctcacgcctgtaatcccagcactttgggaggccgagacgggcggatcatctgaggtcaggagttcgagaccagcctggccaacacggtgaaacctcgtctctactaaaaatacaaaaattagccgggtatggttgcgtgcacctgtaatcccagctactcgggaggctgaggcaggagaatcgcttgaacttgggaggcggaggttgcagtgagccgagattgtgccactgcactctagcctgggcagcaagagtgaaacaccgtatatataaaaaaaaaaaaaaaaaaaaaaaaagaatctaatgccactgctgatctgacaacaggcagagcttcggcggtaacatgagtgatggggagtggttgcaaataagatgaagcttcacttgctcactcacctgccgctcacctcctgctgcccagttcctaagaggccatgggttggggaaccctgaattagttaattggatgaatgaatgatgaactaagtctgtagtagccccagagatgctgactcaggtcacctaggatggggcccagggacctgaattttagcagcttgtcctcagagggttcaaatgcagccggttcctataaccatcacattacaagacacttggcttcccgtattggaggctttttcctggcaggagcattgcttttgcagaggcctaggatacacccatgaggacagcagcctcgccttacacttaagtgcacccgatcctgcctctggcatctcacaaacgtcactccctggaacaaatttgtgaaggcctccagaccacagtgtcctcatctgtaaaatgggggtagtagtaatccttgcctcataaagttcttggcaaggattagatgagcgagcatgtgagtttggcctccgtttaaacactccataaagtttccttttaggataacagcaggccgttttagaaccttccagaggttacttattcagatatccttaggtgacgattgggaagctgccgtttcttgagagcctcctgggtgacagatggagagtggccctggcgtgacccttgaccctatccttgaggctttcctgcccgtctcctgcctcgaatgtgctccgcagcacatggatcaggatggggaaggggctgtgtcactggataccttcggcccctgcccacgtctagggcctgtgaaaacgaggagggacagcaaagaaatggggaaaaggccaggctgtcttcggcttcacagtgacccaaagagacttagtgacccttgctatctggttgtgttccttgggctccaactgagcatccatagggaagcagagatttatccaagacgtgcacctgggagcagtcagctctgcagagcccctcgctatcttctcacccagaatagccgggctttcttccctcccacactaattggttccattcgatgcttttataggcgaccctaatgggttttgtgagatgtcgtattaagtctgtggtccatagagtaatgcccttcgctgtcagggaatgcaagggaagagcagggaattccagaatgggaaggtgtgtgaatgtagaccttcaggttggtcacaaacagtgtctcgagattccactggggaagcgttcacttttagaatcaggccaagctgagggttctctgtcctcaggtattttcctttgtagcagtcactggctcgaaatggagaatgagagaaaaaggagcttgtttcaggccagagacctcactaaccgaataacaacactaaggccctgcagcagggggcacaaactacccagcctgtttccgtgtggcctatgatggtttttttgtttgtttgtttacattttttaatggttggaaaaaatcaaaagaggcatatctacctatttcataacatgataattataggaaattcaaatgtgggtgactataaagctttattggaacacaggcacgcccattcgttcctgtattgtctatcactgcttttgtgctgcgatgacagaggctgcatgtggcctgcaaagccccaaatttttatcatccagccctttacagaaagagtttgctggtccctctcataaagtatccttttttttaaatgtgacagagtctagctctgttgcccaggctggagtgcagtggcgcgatctcggcttactgaaacctctgcctcccgggttcaagcgattctcccgcctcagcctcctgagtagctgggatcacaggcacgtgccaccatgcccagctaatttttgtatgtttagtggagacagggtttcaccatgttggtcaggctggtctcgaactcctgaccttgtaatccgcccgcctcggcttcccaaagtgctgggattacaggcgtgagccaccgtgcccggcctaaagtatcttttttatcatgatagttcacgcttattcattgatgggctgccttcttaccacatgtccttgacatgttttaattccttaagtcctcatagtaaccctagtacatgtactcctgtgattgccattttactgatagggaaacacaggcagagtctcatgtaatctgccttctgtcacccagccagaaaagggcagaactaggatgcaagcacagggagtctgaagccagggtacccattcttgagcaccctgtcacgctacctctcattatcaggttctgcaatactttatccttggagcaagcaaggtgaggtgcctacattttcccatgcaagtgccccaatctgtccctgagaattaaggcccagagagaatgatgctttctcagaccctcaggaacattccttcctgatttgccagtaagtggcagagctgggaccaagacccaggtggctctaatctcatcttcattctcctcattctccaagatggtggccctccctcttgtgccagggactcccagatgcccactcttgggcacagcaaagaacccagatgctcaggcctcatggattccaaggccccagcaagtgacatccctattagccggggagaaggccctggctattgttctgtttgctttcctttgtgatgtattgttacataggaaatttatttcttaacaatttcacttacagcccttaaaacaaaatggggctctggagaactgcatcattagcattgataaacattttacaataccatcatgagcaaatggaagtgtctaatgaaaagaaaagaagcactgccgagtaattaaagaggctgctgggtttttattattatttttagcaattatgactaaaagccttaatcgtgcagcacccattttcccatctgttttgaactcagttatttaaggaaaaaacatcatcatcgtcattgtcagccccaggccaacagtcaagatgcccaagccagcttggctgggcagtgggctaagggtgcccagccccaaggccctgtgacttatccccggttctagaagccttgctccagggcccacccttggaacttttttggttcccctcctctctttttctcccatcctccctttcccttcccacagaaggttttgcttctgggtcggcactgagccttctccatctattatctcttgtcactatgcaaaacagctgcctgaagctaccataatctttgcaggccacatatggtagatgtggctcagagaccagagaagctgagaagctcgaaagaggacacacagctagtgggtagcagagcctgggctggaacctaggtccttggactgtgctgggaggatggagaagatgccctctgctgcacagtgcctgagtgagtctcaggtctgttcggcaccttaaacaagtgccttaatgttgctgagtattcatgtcctggtctgtagaaggaggatgacaacagtagtactaaccaaatgaggggggttgggagcgttccgtgagatcacatacgtcagttacacaaagcacagggtctgtgctcaagaagcgacagacttgctggccacagttcccaaatggtgcggctaagccgccctggggtgctgcagtgaggtcagctgtgggaagtcagctgtgggatagtgcagtgctgtgggatagtctgaagtttcaaggaaaacacagcgacacctgtcggaccctgggtgaactactggctcaaggtagtcacagtttcaacattccattccgctacattccctttgatgacagcatttgtttgtgaaactgggtattggccgttgctatgattaaaaagcaagtaccaccaagaccagtgcagaatgggaaataaaggtgttggagtccagtcctagttcaaggttggaggattggtgcagtccccagtaggcacacaagttccatttgtaagtacttgtgattatttaagaacaaaatgaaggccgggtgcaatggctcatgcctgtaatcccagcactttgggaggccgaggcaggtgtattgcttgagctcaggagttcaagaccagccgggccaatatggtgaaaccccctctctataaaaaatatataaattagctgggtatggtgacacatgcctgtagttccagcttctagggaggctgaggtcagaggatgccttgagcccagcaggcagaggttgcagcgagccaagattgcaccactacactccagcctgggtgacagagcaagactctgtctcaaaacaaaaggaaaagaacaaaatgaaacttattttttttctttcaacatatatgtattattttttcaactggctattacaatgttagaacataaatacttagtaagttgtttggccctacctatttagtaaacgaagtggttagggatttcttttggccctacggtgccatgagaaaaattactgagactctaagagtgccataaactgagaaaatatcaggacacctgccctgtggcacactcagtgactcagtgttcgtttcaaactcctttaaccgataggtattttctgaatgaacagggaaatggaagcacatcttccctccttcccctatgttcacggagcaagcagaagagtttgctgcatgagatttgggaagaaattcaaaaatgtagctccaaacagctccctgggtggttcagacatgagcaaccactttcttagaagacaagtgcgctgagtgtttctcggggatctgtggctgcaaagcggatcagctctgatttcagccccagactttctgacagagggactttccgcccactgccccaggcttggtaattaagcagtctgagtgattgcagaattctcgcatgttcccggcagcctgtgcttggagttaccatgaaagcaagtcaggacaagtcccagagaaacttagctggtgaagaggaaatggcatttatttcaaatacacaacccagagtttgaagttgatgaaatgggaacagagaagttctttcccgttgccccacccgccgtgcaatattgatttgcaaattttccagcagccaccgccgctgcaacacttcagcaatagttgaattaatgaccgtggcagtgcagcctcgtgccgtagggtgggacctcctggagccttcagagtcgggcagagatgcttcctgggaggtgtccggatgacctctctttcggggagtgggggagttctggaagtttccatacaaggagcagttcaagtgttggaggcccccggttctcccagggcccctttgatgttcagcgtggggactcgggggtcatagcagcttcctggatgtgtctgagtcatcaaagctctgcttagtaaccttaaccttagtgccttaaccttgctaaggcacaggtttctcgcatctgaaccacctgcgagctgtttgggagctacatttttgaagaggaaactccacttttattctctggggtttggccccccgatcagcctctccagatgggatctccctccttgcccaatctgcagcccacgccccagccagtccagactgctgtcggttcccggcacaccatagggctgcgcacagctcctgccctggcttcggcccttccctctgcccaggatgcccttcatctggatatctacgcctaacaggttcaactcaggggttccctcctgccgggtgagcagtgggaatcacagtccaaggaactttggtcttggaagtatctgagttccagtgcttactaagccctcgagcctgccccagctactttctcctcacccgtggaatgaggataaagtagcacctaactcagtgtttctcaaactgtacagtgcgcctgaagcactccgggatctggatagactgcagattaggactcagcaggtctggggtggggccagagagtctgtgtttttcttttttcttttcttttttttttttttttttgagacagagttttgctcttgttgcccaggagtgcaatggcaccatcggttgactgcaacctccgcttcccgggttcaagtgattctcctgcctcagcttcctaagtagctgggattgcaggcatgcaccaccacgctcgactaatttttttttaattattatttttagtagagacggggtttctccatgttggtcaggctggtcttgaactcccgacctcaggtgatacacccgccttggcctcccaaagtgctgggattacaggcctaagccaccacacccggttgagtctgtgtttctctaacatggtcccctgtgatgcggatgctgctggtccagagtccacactttgactagcaaaggctgatctcatcgtgttatatgtgacatggcatgtacatgacatgtaaagtacacaggccttgcctggttcatgcaagcccaccgtgataacttttcttgtgtgtaatgtgaggcttccagggcacaccagtctccttcatggaacagaccagactgcgtgtcccaagcatctcactgtctgaggtttgaggagcacttttagttccgcctccttttaccatgcctccccatagtcccgttgggctttccaatctctgtgtaggttgtaaaattcctggggcaagaaacattcaggaggcagtaggtgtgccttgtacgaggatgtgcgtcttggttttggggagcacaggatgctaaatggtcatgctggttttttttgttttgttttgagacggagtctcgctctttcgcccaggccggactgtagtggcgctatctcggctcactgcgagctccgcctcccgggttcactccattctcctgcctcagcctcaggagcagctgggactacaggcacccgccaccatgcccggctaatttttttgtatttttagtagagacggggtttcaccgtgttagccaggatggtctcgatctcctgacctcgtgatccgcccgcctcggcctcccaaagtgctgggattacaggcgtgagccaccgcgcccggcccgtgctgttgttttcaaagacacgtttattcttgaagggaacacaaaagaggtataggatctccttcttcttccaggcagccctgccctggtttccagccaccttgggtgtttaggctggaccccgaaaccacccccatacacaaagcctgagtgtcaaagcctcgctggtagccaggctcagagagaatgtgctaaaccccacacacctaacggccgttttcacatggcagccccccacgctgagatccatatacccaaacatcagcgaggctgccgtgagaagcagcaggagacacacaagctacttaccggccagtttccattactctcccgacctgttccagatttccaaagcggcatgccgggtaatagccactcttgcacggcaaaggagaaatgtccacgatagtccaagaagcgccgtccctggccctgggtttggtaagttgtaaaaggaacttgctgctaaatagccacttaatccccagagcctttgtgatttgtaagtttcaggcttgagcttgaggttggtgacaatctccacctgtggccatagaagaataaaagctttggggggaatgtggagcccccgcaggaagatgagttacctccaacaaataagtgttatgggacatctggtggaaatgcaccctagagataagacaggccgtcggtccacctgcagtcagccattgttagttttattacctccggtggatgaggccaggtgaaaaacagaagttccccacagcctccagagagaagaaaaggagtgtgtttcctgtacatctgtattctcaaacttccatgtggctaaaaatgggaagggggtactttttaaaaatataggttcctgggcccctggcctgttggggctcatgtgggactcaagggtgtgtgtgtgtgtgtgtgtgtgtgtgtgtgtgtgtgtgtgtgtgtatattttttttttttgagacggagttttgctcttgttgcccaggctagaattcaatggcgtgatctcggctcactgcaacctctgcctcccaggttcaagctattctcctgcctcagcctcccaagtagctaggattacaggcatgtgccaccacacccagctaatttttttttttttttttttttttttagtagagacaaggtttcatcgtgttggtcaggctgatctcgaactcctcacctcaggtgatccacctgcctcagcctcccaaagtgctgggattacaggcgtgagccaccactctcggccaagggtgtacatttttaacagggtccccagatggttttgctgcagttggtcccctgaccacactttaagaaacactggctaagacagttctataaaaataaagaagaaatcattgttcagcccaggatgtgcaagggtgaaggaatagtatattcactcaaatcatctgaagtgcattatccagaatagattctggctacagaatctgaagagacattgccatagctcccacttcattcattcattcattcattcaacaagtctctcttgagcaccagctgtatgccaggtgctgttctaagggctgaggatatagagaacaaaacagaccaaaatccttgacctgagagagccgactttcttatgaaagagatcggcgatcgagatcaataaggacgtaagtgcattgcacaccttgaagagtaggcaggaaggtggcaagagggaatattgcagggagggaggctgctgggagcaaatgtgacaactttaagttgggagatcagggccagcctcactgaggaggtaacatttgagcagagatgtgaaggagatcaacgagagcagtgtggatctctggggaaggcacgcacggagaccctgaagcctcagggtgctccaacatgcaaggaggcggatggtgcaggagtgatcagatgggacctgtggtcagagaagacctgagaacaagcctgagtgtagaatttgccactcagcagatggttttcgaatgggtggatccattcagggatcctccacggtatgcacagagaagtaaagagatccagcttccaggaaaagagcagaaaagcagatatacagggagaagcaggcacagaaaccacaaggctctaaggggagaggggttgggagaacagtgatgcagtcactttgtgcatctgttatcaactgctgtgtaaccagttactgcacactgggcagcttatgaggacagacacgtattacctcgcagcttctggagttcagaagtctggccatggctgaactgggctctctgctcagggactcacggggcagaaatcaggtgctggctgagctgcatttcttctgtaactccaggtcctctttcgagctcatgtggttattgatggaaatctgttctttgcagctgtaagactgaggccactgttctcttgatggctgtttgccaggtgctgctctaagttcctggaggctgcctgcagttccttgacacatgggcctctccatcagctcttgggctgccaatctcctaggcagggccccggctcttttaaggactcacctgattaggtcaggcccacctggatgctttttttaaataaagagctcaaagtcaacagtggtaatgtaagaatagaagcgaaatcccatcacattcacaggttctgcatgcactcaaagtgggtacaccaggagaggaaatcttgggggtttagaattctacctactgcccttcagtccagcacaatttctggtttctggtactcgagtggcaggggctaccctttctcccttgggccccacaccatgcacccagctccatgtgataaatgaccattcttgcttccacaggctctagtagatctcagctagagaatcccaagactgtgatgggatgggagtcccaaaggcaccacctcaatttcagcatgatttgcctgtggtgtgcaggatccttctctccccaggagcggagagagggaagcgatcatgctgaaatgcttttgaagctgcctttgtgcaccgtggcgcagatgacacagcagtgccctgaaccctggctgctgctccagcacactcagtcttaatgtattgacattggcagcccttgtatatctcgtcatgccaataaggtaattgaaatggaattgtctccaagcatccaattaatcagcaaataaatcataaacctgtggctgttcattcagggaggcaaagaggcttctcctggctttctgaccaccggagttgattgagctcagactttatgcacttctaatgagcttcaggagaagagaggtaagtccaggcaggtaatgtttagagcgttactgaggccccgggaactgtgtacaaggtccttcacgtatgaaggctcattcttccatcaaagaggtttatgtactggatttttttcgttaaaaaaatccccgtgaagtgaggatgacgattcacattttacaggacaggaaactgaacctcagagaggttaagcaacttgctgaaggccacacagcaagtagagggcagagtctgagttgaaaactagacccgtctggtcaagtgcaatggctcatgtctgtaatcccagcacggtgggaggccaaggcaggaggattgcttggggccatggattcaagaccaacctgggcaacctagtgaaacctcatctctattaaaaataaaaataaaaattagttgggcatggtggtatacacctgtggtcccaggagtcctcaggaggctgaggtagggggatcacttgagcccaagagttgaggttgcagtgagctatgattgcaccacggcactccagcatgggcaacagagtgagactttgtctcaaaacaaaacaaacaaaacactaagcccatctagcgttaaaagccatgttctttttaatcgatgctgtgccagatatgcagatttaagtcacaaatggtttccattgtcaagccaaattttaaatccgggactgtgtgaagtgagaagctattggagtggatggcctctggctgctaccccataccccagctttattaggtgctggcatcggaagtacaagcaagagacgggcagtgtcctgtggtggatttccattcctgtgggggaaaatcctcctgttcgtgtgataacttcgcacctcctaaaagccctttgatgcccaaaactccttcataagctcaagtgtttcctccccttggccgggtggggaaattctaaggaaccattctcaggctaggctgatgaagggagggatgtcattttctcacttgaggacgctttcaagacgtttcacatgacgagaagtcttcacaccaccaacttccccttttttttttgtattgtttgaagttcaaactggagaactaactgtggtaacgggtcaagtcagcccagccaaaggaatgacggattcaaaaaaagtggaaagcttcgaatttcctcacttagaataaaaaaatgttgatctgtctgcccacgtgcaaacagagagcctgcgaggaattcatctgcacccttcaggagggtttgtatctgctctgggatttctacaagcagaaaggagaattattttcgtgattcagagcaattcttcagtgggaaatgtcaccctgaatccttttggctctggtttattggggcatttgctgagcagttgagaacgggggaaagaaggagtcctttcctttctaggaggcacctggatacatctgcagtcaacaagggaccatctgccttgcaaagcggggtttttgtggatcagacccaagccgagtgtgtgctggggctgtggcaaataccctgcagcccctaggaggcaaattggtccctccacaggcagctgtggcttagacatccctggagctcagggaaccaaccgtggtatgacacgtaagagctccagagacaccgtgctgtgcggggagctgcaatcccagatgcacaggctgtgtttctgggcaggacgcctctaaaccgatgcagagaaaacttggtggagggagtggaatttgacttccagtcaaatgtcatcctgacatccagtcccatgcacaaactatgatgctttttcctttagcacctttggtccttgtctcctcttcactattatatgtgcccacttctcttctctggattatgacagctgccaactgctgccttgctaaaagtctcgcccaccccaattccatcctatcctctgcctccgcccccccaaaaaaatgaattacattgtatggttctccttctttaaatccctctatagctcctgtctccttggcgtggtttgagccccacagacctctcccgctctggccgcccgcactcccatctcaggtttctactgctgtgattctgagctgcaccttgggccattcctgggatcaagagggtctcttgatttcttgctctttgttcattctccttcctttgcctggaattcctttagccctccttcttgccagcccccaaacaggaaagattccacctttgctgggctttggggattccaattactaactgtaggaataacagggcatttggaaattcagttttatcgtttcctggggaatgacagacactttccctccatggtgcctgtgggggtggcaggtcctgccctctgttcacagacctggaggggagtgggaaggagctctgtgctttgaacatgcttctctgggggtgcagcctccaggcagctggggcaggatcatgccctcactctctcccttgtgctaccatggaggtcctgtgtgctgaccaagcacttgtcccaagttgctggagcgggtcgtttatttgctctgcatccgaggcctgaatatgattggtgcttcacttttaaatgcgtgcatgaataaatggacttgtctttctcccctgtgacataatccagaagaggaactctatcttgaccatctttgcctccccagcacccagcaccatgcctgaagcacacagttgctcaatgtcgggcatgaggatgctagaggagggggcagctggtggcacaggtggctatggttgcctcagctcaggcaaatcccatgggcatgtggagacccagagacctacagtttttttcttgggtttgttggcttttagagttctaacagttccagcctcttctcttgggcctcctggaagggaatgtctgtcagaatctcccatcaggtcctgaaatttgagagcacaactatttacatattgaaaaggtcaggatagcgtgtgacagttttactttgattgaactagtatctttttatttttctcttacatgaggctgagctacttgctgaactgaaaaggagagggagggagaaggggcacttccccccggggtttcaagacctgctgagcttcatagccaagaggttctcactccccactcaagtgtcagctttccagaatggccccttgaagacaaaaactctttcaaggcatattaaacaatagcaaactctgataaaattccattctggtggcatgttttatgagaaactgatgaggggccctgaaatgcatctcaaccttgatgtttgagccagaatccaaatattccctttctgttaaccaattcaatgttgcttctctcttgtggttgtttttttttgggttgttttttgttttgtttaggattttccttgtgggaagccacattcaccttcttgatactatgaaatggctatacagaaaaatagaaccatccccaagcaaagattcctccccctttggaattgtcccagtgtggacagcacttccctccaactttggatgaacagaacaaacgaaaggaggaactgtgagtggggtcctctccaactgctataatgtcagctccaggaaagcagtgaccttgtccgtcctgttcactgcctgttcccagcatctagaagagggcctggctcatagtaggcactgaataaatatttgtgaagaagctgctagattgcaggctttgtgatggcaaggactctgcctaggtctgtgttattcatgaatgtgtccctcccacttaagagcacagcaggcacaaaatagaagcttattcattcattgagcaactaccatatgccagagatgactcaggcactgaataaatacttgttggattaactaagtgcattcttgcgtacgtgcttgaatgaatgaaggaatgagcgaatgaaaaaaaaaccaatgagtcagttcatccgccagcaataaccaatctcgcctctctgtgctgcagtcttgggacaataagcctggaggtttctctccctgtgctttttctcgcttgttgtgatatccctgcctaccaaaactcccaagaagtgtcagctccaatgatgtttctttgaatcaccccatctggcaagatgcaaacactcttgcttttgaattgctttgtcactttctgtcttagctgttgagcacagttcaaaacccatttgctgagcctgtcctgtggacagccatggtggcaggagccagggatgtagaagtgaccctggagtcaccagggttcagtgtgtgtcttgcctgcctggattgtacaagcacccacggctcagagacggagacttcctcctctctgtaactgcacttggcacctggtagtgagtctggtcaaacagatgctcctgcactcaccagtgaatagacccataagatgtgccgcctttgagatctttgctttggtggatttgaaatatgggaggaagagctgagctgcactgtgtgtgggccagagtggtgcgtcgcaggcatgaagaggccaggagtagggagagttccatgggggtcaggatcagagaggtccatagtaggttcaggtgtggtggctcatgcctgtaatcccagcactttgggaggctgaggtgggaggatcacttgaggtcaggagttcgagaccagcctggccaacatggtgaaactgtctcaactaaaaatacaaatattagccgggcgtggtgacacgtgcctgtaatcccagctactctggaggctgaggcaggagaatcacttgaacctgggaggcggaggttacagtgagctgagatcgcgccactgcactctagcctgggggactgagcgagactctgtctcaaaaaaaaaaaaaagtacatacaatgcagatattaattattcattaattggtcactgcaacagtgagactgaggacttctttgatagaagccccagtgctttctaaattggcttaagcaaaaagaaacaaaatgaacccttcattggttcccagacatgatgagtcatataggtcatcgctggcatttgggagacccagcagtggccagaatctctccctctcctcgggtctcagatctgttgtcccccaagttgctttggttcccagcagattgtctggtggggtcctcctcaccctccactactccctgctgtcttgaaccactttatttagcgttggcagtggtgggagggagccgctttcctgacagctccaacaagagtcctggagttgatctcaggtcgcttatggccaagagattggaaaatgctgattatcccagtggagacaggggcccatccatggaacagaggggatcaatcttacctcaactgcagacaccaagaatgaggtttcctgaagcaaaaccaagactctggtacctggaaaagaggaaaatgcaagctggacggacaaaaaccactcttggctactgtacaggctatcaagagaaactaggagccactccaatgacagaacattgcttgttgaggggagacggtcaaggctggctttatcatggccatcaccagtgccctgaatggttccttatgtgtgggcatcattaacctggccatttgcacacattattaataacactagcagcattaataatggctacagagatgctttatgtgttttccatgcactggctgagtatcttactcagtattatcttatttagtcttgactgcaactctgtaaggtaggaactattggccccattttacagagaagggaatcaaggtccagtgaggttaggtggcctgtccagaatcacatggctaatccctgatggtggtagttttttttgttttgtttttgtttttttgttttttaattatttaagtgtaacaggccaggtgtgatggctcacgcctgtaatcccagcaatttgggaggctgaggtaggacagtcacttgaggctaggagttcaaaaccagcctgggcaacatagcaagatcctggtactctacacaaaataaaaataaaaaattagccaggtatggtggcatgtgcctgtagtcccagctactcgggaggctgaggcaggaagatcacttgagcccaggagttcgaggctgcagtgagctgtgattatgacactgtattccagcctgggtaacccagtctctttaaaaataaaaacaattctttaaaaaagtgtaacatgcatccagcaaagtccatagttcataagtaaataactagaaggattttcacagggaccaaactcaagcaagcagcactgacatcaagcaaaagaggaatatcaccagcacccggaggcacctgtgacccctccaagtcactacctgtccccaaggtcatcactgccctggctccttgcagcagtgatcctgcagctgacccagaaccgcctgagcctggagctacccatgggcagtggtaacttactacagatagaccttgaagttcaagtggcaggagatgatatagatgaaaggaagtcttgctaggaccattgaatcgccttatgacctaaccaaaaggtctggccaaaaatccagacagatcctgatctggacagtgccctgcaggccagcacccagcaccatcccagtgccctggacctgggagtatacagcgccaagaccgatctgcagcctggcaatgtgaatggggcgtttatcattaaaagaaaaaaaggaaaaaaaaaaaaaaaaggaaaatcacatgctttctttaacaaaagggcttctctgcaactgtttttaaatggtacgcagctcaaaatagataggaatgatagtacaagaaggtaaataaagaatcccctggcacaatcgtgggccttttttctctgctggttgcaaagccaagagtaattagcaccgtgagaatggggggaagtgattgctgctcctacaacactctaattaacagttactaatagtcataataaaactgaaaggaggctttttaaatctcgccattgagtgagtgcttggtatggcagagtgctcagcattggggacccactgcttctcggggctatacacttggcatgggttcatttctctaatgttgttaggttggttgggggaaaacagtggttaaatatggtggaagagtggggaagagatcttaatcatcactagaattattaccgctaataagatcaacgactgatccatccggagcttcgtttagacaaatgcagtcttagacactgtttcctttaaccctcaggataaatatttggctgatgttactatcgtcttgatttggcactgctatattttctgttggggacagttttcatttgtcacgagtgggctttcaaaagactgttctgggcgaaccgttctgctgggcacttggcatccccggggtaaattggtggtctcttgctctcatggaatttatgactcagcagaaataaaatataacagaagctggctttgaaagaaaaatcacattcattgtgcaatatgatttatcatgaactttaactggttgggtttttaaatgccatttatgtccaccttaaattaagttatcccagttcaaaatcacccacagctttcgtgatgggcatgtgttctgtgaatgcagtcactttgtgacccattagtgacactccagctttacagtcactaaggatagatggtgttctcttgattcccctaccaagttcgtcatctttcctcaaaaatgcaggtggagtttctggagtggcgaagaccacagagccatgtatttacttatttaacatgttactgagtggcctcttctccaccactcaataacaagagcaagtattttggaaggattaaaagtgcggaggactcagtctctgctgcaggtttcttgagggagaggtcactggcagacaattacttcaaacaccgagaaacagacaacatggctagcaccaagtctcataggagttcagggcaaacttagactttcctgcaggccagatgatccgggaaggcttctcagaggaagtggcactggaagtatccagaggccattgacaagcagaggggaggcattccagggagaagctggagttggggagctggggtcagggagggagggtggagagggagatggtgaggaaagcagctcttgcaggtccttgagtgtcaaaatatggggtgtgggttttagtcagtggaaagtggggtgccatgagtctctgtaccagaacaaggtcaaagtagtcgtctagagatgtcactgctgtaaatgatttccttttcagttattttatatgttggtggcaaaatacatataacatacaatttacccttttaatcatttttaagtctacagtccagtagctttcaatagagtattgtacaaccattaccactatctacttctcatcttcccaaatgaaaactgtatccattaaacagtaactccccatcccttgtccccccagcctctggtagtttctattctaccttctggctctatgagcttgcctattctaagtaccccgtataagcagaatcatatagtatcttgtatctgacttctttcacgtaacatattgtcctcaagattcatcagtgcggtagcatgttcagagttacctttctttccttttgaagactgaataatattccattgtggtgtgtatgtgtatgtagatagttagatggatacatagatagatagatatcacatttttatttttattttatttatttatttatttatttttgagacagggtttatctcccattgcccaggctggagtgcagtgacacgctttcagctcactacaacttccacctcccaggctcaaatgatcctccttcctcagcctcccaaataactgggactacaggcatgcaccaccatgcctgcctagtttttctattttcaatagagacggggtttcaccatgttggccagcaggctggtcttgaacttctgacctcaagtgatccacccatctgggcctcccaaagtgcagggattataggcgcaagccactgcacctggcccgtatcacattttaaaatccattcatccatcaataagcatttgcgtagtttccaccttttggctgttgtgaataatgctgttatgaacattaaatacaagtatcagtttgagtccctgttttcaattcttttggttatatactcaggagtggaactgctgggtcacatgataattctatatttaactttttgagaaattttcacagtgttttccacagcggctgcaccattgcacattctcaccagcaatgcataagggttctgatgtcactacatccccgccaacaccggttgccaccctaatggacatgaagtggtattcggcttatatttgctccagtgacaacatttctgttttgagaattgttctctaggtttccagcttgatcatttccctgatttccaaacatttcaacttttagtcttttccccttgtgaatagagtggtgttgagatgacccagggatcacctttgaggagctaagctttctggacatcaagctctggcttggaaaactggcccatccttggctatctctttcctgtgagttggatggcagcttatcaaattctaccagaattctatcagaaaagcagatttctgcagattctgctagattttctcccagaaaaaacatcttttaataaaaatgaatcttcatgagccttcaaggacacatcagcaaaaagcccacttctctcatctttactggctgtctttagctcacaggaatgcaaggaacttagctcattcattggcgtttcctctggggatatagagtgggcatcatcgcatggctgggagttcatgacctgggttaagccactcactagttttgtgatttggggcaagctgaccttcttctgctgggaggaagggagttgtacacttcttttttctattatctctttgtgcctccgtcgtctcatccgtgaaatggggataatgattgagcctccttgtagagttgttgagaaggttcaatgaggcaatgcgtgtaagtcatttgtaacagtcactggcaaacagcaaatgtctcaaagcttttcacctacatgagttttgttgaggttggtgtctcttggtctcaatctcttctaagaaatggagctaataatagttgatgttacaaaagccctgtgctgaagactaaatgaggcaatgtatgtgaagctcttggtgtagatctaggacatagcaattgttcaataagcatcagtcatgttgtcactaccaagagtgctgatgccaacttccagtgcccctggataggaaagtactgacctgaccccttacttcaaagggctgtggttatatcccaattcagttaagtgagccacgaatttgagaagaaagttttgcaaacatcagaatggtctcctaaactctgtaagaaaaagaccacaaagtaatcaaaaggtacatgttctagtctctgctctgactctaatttgctgttctgccacaggcaagtcactctagtctctgggcttctgtttcctgctattaaagaccctatcaagggtgataaataaacgtggtccacatgctattgcttcccgcagcagacattactaattgatcccagaactcacatccactgagacctgtttcagcctcagactccttctcaacacagtgctatgggcagcaactagcaatcaactgcaattgactagggagttgaaactaatttgatgttccaggtggaaatctcaattctgttacaagcctttctcccatactaccataaacacaggcaaataggctaagatttctttttaaaattctgcatcagttatagccaccgaatgtttttactaggccaggtgctgagaacaccctcaatggagcaaaaagcattcttaagccactcttaaacctccttcaggagagggcttcagttccacacaaggaggcaaatgagaatcaaggaattagttgcatggggaagcaacagacacatcaaaagagaaccatgatgcagcttgctcctctggctcggcctgtggttacaggaggaaggcaggctacagggcagaggagtattcccagtaggttggtttttctgcacaggggcccttctgtcatggtgctcaggacctgtgcgtcctcacacaggcaccaggcctcccattcagattgaaagctaacagacttgcccagtcctctccatttcctgcctctcctgggagccattctccttggcccatcctaaggggtcttgggagtcgtatcacctctctgggcctcagtttcctcatttgtcaagcagtgagagtaataatgcctccttcttcatgcctaccttcctcatgggccattgtaaggacccaaatgaggtcatagttctgtatcttgtttttggttggtggttacacaaatctatacatggggtaaaatgacatagaacaaagacatacccatgaccaaaaaaaaggtggggggtgcatgcaaaaaccagtgacatctgagatactccaccaatgtcactttcttggttttgatactgtggtaatgtaagatgcggccattgtgagaagctgggtaacgggcacagggtacctctctgggctattttggcaacttcatgtgaacatattatttcataatgaaagtttttttaaaaaaaatgagagccttgaaaatgcatcagacaattttgagacagtattcatgggtgcggccacagacatggactcctctgcctcattcccaagaattcaggatatcaataaaggagagcagccacggctcctgaatttccacagcactgtgggctgaataggtcaccccatcctgcaagccaattttttacctgacttaacggaaacgaagttttacgtgctccctattccaggtacgaacactgaggcttcagtcagcaggaaaatatgcctaggagtgctcataacttgccatcttttttctttcaaattcataatctgggatgctcattagctttctgtttcagaaataatttcttctttgatttttgtacatgacaagtttcttttctaaaaaaaaaaaaaagacctttaaaacccatttgtcttccattttctctacatagcctgaggacctgaaagaactgattaattcctagacttgttaattactcttgcatggaagcaaacctctaaactctaatctcctgaagatggctcacatttgagccctgtgctgctagtcaggcggtaggcaggagtgtctatgctttagaaaacacatgatttcagggatcagtttgggagggttctcccatcatgaggctatcaccagaaatacgcaacagattctgctgggtgagtgtcaatggccagatccagtgtaacccctgatgttccatttgtgctcccacctacaagtgagcaagggctgatcactgtagggctcagagtgggagatggagaatggttcccttgttacgtggcgacgtcatttataacatgacctagactctgggcctccttcctttggagaggagatgtgaagctttgagtatgttcttgtctgttttgatttttttaaaaagctttattgcctaggggaaatcataaatcatacatgctcattttatgttcaccctaaattccaccacctaaggatgatcgccattaacactttggtgagcttcccctagatctttccaggcctttaattacatgtggatgttatgtatacatgtgtacttaatacgtacatgtgaattgaatgtgtacttgcatgctgttctgtaacctgctttttcattcacgttgttagaggcaagacagttaccttccttgtcattgaattctacccttctttcatcaccatctaacttgtagctaacatatctgtagcacttactcagcgctaggcattatccacagaacttctcatagcttacctcgttaaagcctcataacaccctgacaaggtaggcactatgactgtccctgttttattgcagagaatactaagacacagtaagaccttgggtaggaccttggtaagagacttgcccaaggtcatacctccagggcttggacttgaatcaggcatcctggcactaaggtctttgctcttaactgctgggctacaactggtgttcaaccctgagtccaggggttgctgagctcctctggctatggaatggcaaatgcttgtcacagggagcaccgtttctccttcatgtttccaaaacaggcatcactagtgatcacagcaccttttcccaacagtcctagactggcataggatccttccctatagatatgccatcacaggcagccactgctgagcctttgggatggtgtctcagtctgttttgtattgctataaaggaatatgtgaggctaggtaatttaagaagaaaaaaagttttatttggctcacccttctgcgtaatgtacaagaagcatggtgccagcgcttgcttctggtgagggcctcgggctgcttccactcatggcagaaggtgaaagggagctggtgtgtgcaaagatcacatggtgagaaaggaagcaagagagagaggtgaggtgtcaggctcgttttaacaaccagcttttgtgggaactaacagagtgagaattaatctattcatgaagaatctgcccctatgacccaaacatcttccattaggcccacctctaatattagggatccaactttaacatgaggttcagaagggacaagtattcaaaccatagcagacgagtctgtgagatgatgctgatatgccttccctgatccatctaatgccgttctctccttctgcgcataaggaaacaggccccaagagggaactgacttgtctaagtgaagggcagagctgtcttcatccatttgtgctacaaaacaaaatacctgagactgggcaatttagaaaacatggaaatttatctctcatagctctggaggctgggaagtccaagatcaagacaccagcagattcaacgtctggtgaggctgctctctacttccaagatagcgccttcttgctatgtcctcacatggtggaaggacaaaaagagcctagtcagttccctggagccctttcataagggtaccaatcccattcatgagggcagacccctcatgactgaatcacttcctaaaggcctactcttaatactatcacattggcaattaagtttcaacataggaatttggtggggaggggggacacattcagaccatagcaagagccaaaaccagcgcttagttttattaatcacaaagcccatcctttttccaccaccacaccactgtctgttcaaatctaacaaaacaaacaccagctaccattggagacacactctgatcagtttcagtgcagcccagctgtgcatttggaccactcagaggtaaccagagagcttggcattgaggatggaccacaaaggatcattttatctcaatgcactttgtagaagatgttgccaaatactgaagagtgcattggtgacatcagtgcttttaatttatacagtggtcacagctcaggggtcagcaaatcgtggttgaggtcaattgccgactgtttactgagaggatccatcattggagggcactgagggagctccaggaagcatgccttcatgcaacaagcatgcattgagcacctcctgtttatttttcaaatttattattatttttaaatttatttttctttcaataggtttttaggaagcaggcggtatttggttatataaataagttctttagtgagcacctcctgtttatgaggagaaactaggtttacaaatgagacagtgacaaatgccacaaggtgacactggtggggttttatctggggaggatgcttctttccattcccagtttggtttcaactgagaatttaaaacatgagagaggctgggtgcattgggctcacacctataatcccaacactttgggaggctgaggcttgcatattgcttgagcccaggagtttgagaccagcatgggcaacatagtgagaccccacctctaattattttttttacttaaaattaaaaaaaaataaaataaaataaaacacaggagaaaaatggagatcacaatcattaccaattgaactgaatggaaacaaacttagtttggggccaattcttcaccccaggggcaggcagagctgaaggactgcaggcccctagccctccacccatagaggctacatctttccctgcactcacctctagggagggaacacactagaatgcatatgcccagtgggcaagcaggcctgtttccttctgcagctctggaggctgcgaagtccaagatgaagactccagcagattcagtgtctggtgaggctgttctctgcttccaagatagcgtcttcttgctgtgtcctcctcctccttctcctgagacaggagtgagtgaaggggaagagggtgccgcaaatgtgggtgaccagagcttcctctatgggacacttggctaggacttggaggttctttccctaaccagcctgtgaccaatcgacgtaggctgtgtacatttcagagagggagatccatgtgggctccagccacggggaagagttcttggcagagaccccctgatctgagtgctaagagttgggtgggttggggtggacagctgcagggcccaccctgggctttctgcccagggtgctttgggagaaagacaatgatttatgtgggatacagtggggaggccagtggagggattttgttgcacataatcagatataaaacacagcctttaaactttgtgcattgaataggtctacagaactcaaatccatgggccggatgtggtggctcacacctgtaatcccagcactttgggaggctgaggcaggtggatcccctgaggtcaggagttcaagaccagcctggccaacatgaagaaatcctgtctctactaaaaagacaaaaattagccaggcatggtggtgggcgcctgtaaccccagctacttgggaggctgaggcaagaggatcgcttgaacttgagaagtagaggttgcagtgagccaagatcacgccaccacactccagcctgggtgaaagagggagattcggtctaaaatttaaaaaaattcaaattcattaatccagatttttttatagtcacgttgttggatgatgtttgtggctgaggttcatgcttcctaacatgggaaaatgtgttctcatgcaaggagagggagagaaaagtgtgctgagagggaagggaatgggctttggagcctggtagatgctcactggaatcctagctccaccacctgccagctgtgtgaccttattcaggtgacttaaccttgctgaacctctgcctttcccccacttacaaaatgagaacaaagacatggattttccggattgaaaaaattaagtgaaacaagtctcgcatgaccgggcccagtggctcacatctataatcccagcactgtgagcggccaaggcgggaggatcgcttgagcccaggagtttgagaccaccctgggcaacatggagaaaccccatctctactaaaaatgcaaaaaaaaaaaaaaaaatagccaggtgtggtggcgtgtgcccacagttccagctactcaggaggctgaggtgggaaaattgcttgagcccaggagacggaggttgcagtgagccaagactgtgcaactgcactccagcccaggcaacagagtaagaccctgtctcaaaaacaaatgaacaaaaaacaggccttgcaaggtactattgccatgcttgtccctaaattccctttcacctgtctccctgccctttgctgcccctgaccccactccaccccagaggatttttatatgaggtacagtcctaactctggtggggaaatgtctatgaaagctttactgtaaaaaatatataaatcttaaaagtcaacctatatgtcgtgtggttgtagattttttttaaaggaaggaggagaacagcgctcctgggaagttacgatctccagaagcaactaacattcattacaaggaaggtctcagcgctgattcccacaagtggcagagaagaaaatgagatgcaggctctggatttgcataatcgctgactgtttcctgctcatttgccactttgcaggggttcagtgtggagggcagccccttcctggcctggacaccctctgtgcccagggctccacggggtccctcttggaatggtgctttaatgatcactcagatggcatttagcctccaattaagagccgggaagaaaagcactggccaagtggagtgaacattccggggaattcacccacttaggagaaacctggagaattagcaggcacacaaagccacctcttgactggaagcagatgccttgaagtctcccagacgccccacaggctgcaaaggaagttggccacagagctgacctgtgtctagaatggtaccaaggactctgcacaaacttgagaggccctgtccactgcaggggaggagaagaggcatggagggaagtcagcctctgcagacacggtacttcctgccttctgctagttgccatggctttgttcctcataacaagcccatcacaagccctgacaaagctcatggtgtggctcagtgatagaaaccagctggcccaggtatttctgacaccagagccatggtcttcagcatctgagcggacatcctgctctcagcagagcccactggaggctcttcctcatcaattaagcctgtctgttcatcctccatctttgacttgctctcgatttccttccatctaatggattccttactctgagacaagcacgccccggcaagaggtctggaaagccagctctagtcttctgtcagcccccctgcaaaaatggcatttgtctgataccgggtgtccctgcaaatgtgattgtcactccagcacatctctgcggatgagcaggaggtggaagtggccattactggtgccactgacaaagtgtcaaaccaggatcttgccccataagtgccttccttatcaattgatttctcattgaaatatcctgcagtaaaattcagtagtgggtgcaccgtggaaatagagcctgtttcattggatgtagcactgtttataaggcagcctcggacaccactaggttctgaaatgaaaccagagcagcctaacttcatctcttcaactccccaggtctgggcattgtgaatataccaggcattgtgaatataaagaagggaacttgtaggttttgaatgtcttcttactaaagagtttgttgaaagaagaacaattaatctctttgtcttaactggcttggccacatttcagtgctggaaagaggagaaaaaaaagcaacagaacaaaaccttttgtatttctgccagcagaaggtaacggagaggctcgtcattttgtggacatttttgattaagtgtccctttaccttttaatttgtgcattcgggtttcagatcttctgcggcaagagggagaaattgttgcacattgtcacacctcatttgtctgccacagggttgtgaaacttcagcatccaagctcagaagtttgcagagaaaggatttcaaggccagtgactctgctctggatgacttacaacttaaacatcacctagccttgttcttctgctcccaagtgtccacaggaaattaatagttacaatatatggtttttttcagtgttcacaaagtgtactctggcactatgtgggacaaagaattatgcatcagctcagcccatagttctcaacacctgcctgctcctgctttctctttagtatctcatttctgagcaatggctgaagaaaggcagctggctactgaaaccggaaggaaagattggaatgtactggaaagaacaaaggaattacaatctaaggactgggttggttcaagtcccagctcttccacatactagctctgtgaccttgggcgatttagtcaacccttctgagctttagtttcctcatcagtaaaatggcaacagtagcaaccacctcctagagttttatagggaaaaacagatacaatttatggagagtgtgtagtgaagtacattagacactgttggtacttttatgatatggaggagagtccaggaatcaaaactgctgctttttaggaaaactatttggctaaaatcaatagtttgtcgcagtagtcccctggcactgtgatgtcatgtggtggggaatcaagatctctcccatgggctcaaggatctcttctgatgccttctcatgggagcaccttctacatcttgcgtatggattaagaattcattttcctgattgtccagtctaattgtttatagaacctgtcgccactatttgctttctgtttaagaagactgaaggaagagaagggagggaggaaagagagagggaggaatacgttttggttaacagtgaccccattgcattgactgggatgtgtggcaggctgaattccaagtccacacaccctggaatggcattttgcatccatgctgttgccacagccacaacacaggtagatggaatggacttcactgcctcttgactttgtttgtttgtttgtttgtttgtttctttgttttgttttgttttttctctctttccttccctccttcctcccttcctccctccctccctccattccttccttccttgacaggctcttgctttgtcacccaggctagagtgtaatggtgccattatacctcactgcagcctcaacctcctgggctcaagcgatcctcccacctcagcctcctgaacagctgagactacaggcacacagcaccacacccaactaatatttatttatttatttatttttagagttggggtcttgccgtgttgcccaggctggtctcaaccttctgagctcaagtgatgcttctacctcagcctctgtagtagctgggattacaggcatgtggcatcaggaccagctaattttttaatttttttttttaagagatgagagtttcactatgttgcccaggcaggtctttaactcctgggcttaagcaatcctcccaccttggccccccaaaatgctgggattacaggcatgagccaccacaatgccctctcttgactttagctttgtgacttgccttggccaatgcgatactagctgatgtgaagcaggcagcagcttggatgagcttggggtgttgaatgtgctttttgacctctctgctctcccaatgcttgtgcctccattcttgggatgggttgggaagcagtgagagcgattagaacctctggggagatggggatgctgagggcctgttttgcctttcagatgatgaaaagatctggctttgcatgggttactcttctgggtctgaaaatctttcttgagctgggtcatttgaatccagaaaaaaaaaaatgaaagagaaagcatgaaagtaagagagctggagaaagaggagagagagaggaagagagaggcagactttattccaccagttcacctggaccaggaattagtcctaagctaacctaggctaccctggacaatgaaggggattttaagaagggagggaggattctcttggagattaactttgggctttggcctagttgagtcttgttagactttaaataaaaatccgtgggggaggggcacacacagggcagccacggcaggagctcgcgttcctatctcagcctggctgtgccaaagcctgacatttcttgttctgataattgatgtggccaagttgaagcttgtcaccgtgagagcatcgcaccgtggctttggtagtgccgtggctatgtgaagagtgagaaaaatcaatttccactgtccacggaaggttgtttgatttattactgttggaagaagaaattctttatctcccaccccctgttggagagcactgttttacagtctgctgttagagaggctctataaaagcagctatatttgtgcaaattttggtattttgataaccttccttgactattcagaggacattgaacattcccaatttttataaccctcatttgtttttgattaagcaattataggcactaaaagacagtctgcaagagagtgtggccagcgtacctgcaggattatttcatgccataggaagcatcagacggctttaatatttcatgaccactggcaggaggaaggaggggtttgctaggaaagagcagaggatgcgatctggagtcagacggggattgggatcccaactgccattggagaacaggtcggtgtccatgagcctcagtttccttatctgaacaatgagtatgtgtagcagacaataccgtccagatcctcttagatcccttcaagccttttcttgtgcaccacgcttgcctgccttggtgtgcttctgatttcagcatcctgcattgtggctcctcttccaggactctccctttgcctcccggcctccgagaacttaagtacctgggaattaatgtcccctcagggcagcccctcctcccgtgactgacccacctgtgagtttgaaagcagcgctcccttgcctcacctcaggacacaccccgaggtgtaacttacattccaggtgggtgtaacttacactccaagttggttcaggctgaggttcccccaggcacaactttgcctgaaaccaaccaatgctcgcctggcttcccttccttccccaaccctcttcccacccccattactggaagacttctttaatacatcacttgggcccaaatcctcgtctcaggctctgcttctgagaaacgcccccaagatagtagactggtgctccttgccaatgtttttacaaattgtttcattaacttttattcagcacttcaatgtgccaggcgtggaattaaatggttgaagtgcgttatctcttttaaggttgtgatgataaaataaggtctaaggaggtactttgcacagtgacaaacacatagcagcaactcggcactcgctggcccagtttgaacatgattgggctgcaatgtggtgagaggactcagggcaatccagcagcctcctctctctctccttcgtcccctcctgccccttccaaatttttctccacacagcagccagagtagtcttttaaaacatatcaatccaatatgtaagaccctctggtggctacttgattgcacatagatataaaattcaggccaggtgtggtagcttatgcctgtaatcccagcattttgggaggccaaagtgggaggattgcttgagcctaggagtttgagcccagcctggacaacatagcaagacctcgtctctacaaataaaataaaacccaaacttcctaacaatggggcttagcaaacttttttctatagagggccagatagtaaatacattacactttgtggaccttacagtctttgtagcagttgaagacctctgcccttctagcactgaggcagccatagacaatatgaaaacaaatggacgtggctgttttccaataaaactttattcataaagacaggcagcgggccagatttggcccacagacagtaattcggtgaacactggtctacaaaacaactgaatggggaggaccctgcctccctcaccagccaccagtctcattctgacccactcctctccccagtcatttgctcctgccgcactggctggagaatcccagcattttcctgcagcaggctaggtctgtgcctaccgttccctctgtctgggtccaggaatctcttcctggagccccctgccttgctggctcctgctcatcactcaagtgtcagttcaaatgccaaatcctgcctcttcaaagaggcattcaagagcctgcagatctactatgtctcctcccccaagcccctctgttctctatcacctcagtcattaatttattcccctagtcacctgtttgggttctgcccacccttttggaaaacaagcttcaacactgattcagcattgatcagcagcatcctcagcccgtagcacagggcccagcacctagcaggtgcacaatgagtgtttgttgattaaatggtctctggggatcctcccgccctactgcccccaaccactgtcttctgtaagaagagtttttgaaccacggaaaacattagaatttcaagtgattatcttggttgtaaagcaaacctacaaaaccctaaataatcttcctttcttctccttccctgtcaattatgcagttaaacggaacatctcacagggggatttgcctgagcaaccctcacttttcttttctcagttccaagcctaagactgcagacctccattttcaaggctaaaaacaccaagaggaaggtgctgtctgaacgtggcactgagattacccagttaattaaagagggatttaggagttacttaacatctgggtggcagagtctttttttttttttttttctactcagcttcaaaaaggaagcagaaatcgtaatatgccaactctggctctaacagatgcatcctgtgtgtgacgtgatcctgcagcaaggcaaacctcttcttccctgggttccttggctccaaagcatctgatgcttttcataaggacacctgtgacctgcttggcaaagcaagctctgtgtcctcaggatgacggtggttccagaagtgctttggtaaccgctccttttattatgtcatacttgagggcagtgattcttgaacagcagacattgccagagggccaagggactttgagaggtggtcagagacatggccgccattcgatggggaagggccttgaatgctatgccaaggaatgtgagccgtatcctggccagggagtgttgagaatttgaccccagggatgatgtttggtagtagccatgaaggaggaaggtggtagccagcagcccaagttggagcttgttctagggcttcaggtagcaggtggtgggaccttcctggcatggtggcatcaagaaagaagaagaggccgggtgcggtggctcacgccagtaatcccagcactttgggaggccgaggtgggaggatcatgaggtcaggaaatcgagaccatcctggctaacatggtgaaaccccgtctctactaaaaatacaaaaaattagccagtcgcggtggcaggcgcctgtagtcccagctactcgggaggctgaggcaggagaatggcgtgaacccgggaggcggagctggcagtgagctgagatcgcgccactgcactctagcctgggtgacagagcaagactctgtctcaaaaaaaaaaaaagaaagaagaagagaagcaactaagttcagatggcttctccaccccacaggggccatgggccagacggaggcaggctgtggcctcagcactgggaacttgcactttgttcagtgctgatggcaacaataataataataataatacctacttctatgggttattgagatagaaggtgcctttatttaacttatttgtaacaagtcttttgtgaacttttaaacactcatccggtgacatttctgtaatgcttcattcaaataaagacattcataacttggcagtctgtgagctttcaaaggactttctcctcatcctgttttgacaccgaatcttggtcttaggatggctgttgagtagctctgataggcaaagtgagaggtatggtgtggccaataaagtagtcatgccagtaggccaacagcaggcaagagctgccattaggaatgggagagggaccattctgcatgctgaaggcaggattcatgtgaatgacagcagtcgtaccatacagcaactagttgaggagctgtttccgtctcaggcaagcccagagaacagatgcttgcaaggaattcctctttcactgtgtgtatggttttggttgcaagcatcccactttggctgggttagaatgtcctccaggatcccactcacctgtgttcttgaccggccagggcccctgaggataaagcgagcacctaaatcaatacccccaataacatttgtacccagctacaccataggagagaacagaattagagccttgcgttgccacccctgcctccccttggagtttcacgcaaaggcattgttcttctggggcctgatttcaattgcagtgagctcggaatgatgctttaatcctctgtaattactcaaggcaggaatcaggctaatgaacaaatataaatggacaactggccttttcctttggagtaggaatggatatcctccaattatgatcctttgcctaagggggagatgggatgtaggtattgatacttgttttattttatgttattttttatttgagatggagtcttgctctgttgcccaggctgcagtgcaatggcacgatcttggctctctgcaacttccgcctcccaggttcaagtgattctcctgcctcagcctcccaagtagctggggttacaggcacgtgccaccacacccagctaatttttgtatgttagtagaaacagggtttcaacatgttggccaggatggtgtccaactcctgacctcaagtgatccacccatctcggcctcccaaagtgctgagattacaggcttgagccaccacacccagcttgctactcattttaaattaatgtacttgtttaccttcttgcgagtcaaatacatcacagtccccaggtgatggttctcatttacaatttggtaggtgggcctcctgggaaagaccggcaggagggtagaatccacattcccggggcactgagggctgggacctcaggcctttgcatgggctgtactttctgcttcgggcaacctcccttcagaggcccccacagctgaatccttacttcttcaggtcttggctcaactgtccccttcccaataagccttctcctgatcacgatcaccctatttaaaattacaaaccactcccgaccccctcccccacaccccccccacaatgtgggcattccttccctgttcctttttttcccaaccttctaacatgatatacgatttactgatttattcatcatattctttgttatccgccgcccctctgcccccccatagaacgtaagctttttaacaagtcttttctcacaggtagatacggttgcctgttttgttgacccatgtatcttaaatgcctggagctcataccaggcactcagtaaaccttagtagaacaaatggatgaagaaatgaagagttggagggagggaattgaaggagtgcaggacaggaaggctctaagaaaggtgtcaccatccttgaggacagtcaccctgagagaccagatctggacttgctctggcaccaggctgggtatagaaacaggcagaggccagagggaaggattctagtttcatgagtgcctatcctatgccagtaaaactgtgggtgctttctctgggttatgatcttcaatccccacaagagtgctgcatactggatgttatcgttcttattttataggtaaggaaatgagattcagagaagccacatactgcctagggctatggtgagtagcagaaccaggcttggaacccagttttctaaattatttcatctgttctttaagtacaagtttgatctcctcctccaggctccaagactagtgcttctctctccacgatgccgggctcatcagccgcagcactgttggtgtttgggactggatcattcttggttgtggggggctgtcctgtgcatggtagggtgctcaacagcatccctggcctctacccaccagatgccagtatcattctccccatagtatgacaaccaaaaatgtctccagacattgccaagtacctccttggagacaaggtcaccctcagttgcaaaccactgctgtagatgaaatagaagcagttctcattggccctgagaaccttcagagaagtaagaaagagttgttgttagggccatcagctggcccggcagccagggcctcttgtgttgtcttactctggggaaggtatagcccagtctggggtatggtccttgtcccccagatctagaacttgcccctcagaggtggggtttcaattgaattgtgttagtgtggaccatttgagaagcagctaaggtggaatttggtgtgcagatgtattgggagaaatgcctgcaaaggacataggagagacagggagagccttcagacagggatgtggggctggtgcctgcgaatggagaaggggaaggaaggagtgttggtagaaagagccccagatctcagcgcagctcagagagtgcctcagccaggctgatggggagtcctcaagccaaagtcacctgttagaggaatgggctgcactcataatttttgacaggaacaacccaggagaactgtggtcttggtggaacacaggagtggctgccgaaaggaggcagctgagctggcagtccattgtgctcaggcagcaggcaatctgggtgacccgctgatgacactcacaccagaagcccgtctgtgctgaagcaaatcagcgccagcactgccagccattggcatctgtcgaagggtgtgtctgtgttgtctcagtctggtgcccacaaaagccaaccttgagatgatgactcaagggcacatgcatgttttgaggaggtgacgcccatgaaactccagtaggtgaataggatagtgagacaggagaggaaaacagacagtagggggatatatgagagcgagctgccaccgtgggcaactggagccagtcctgtgggagctccagaaactacaggacacgggtatgtctggaggttttccagttgagggtcaaaggagctggggtcttcacctgccaactccctagtcacagctcctgggctgcctgagtggacatggatgctggcagctggaagttgcccccagttgcaccataatggtaagaccatttggcatcccacatgccccaagcactcactgagctgccccagaggctgggaaaaggcctcgggcagagccaccagtgtttgcaaaaaacagagctcggtgcctggaagccagggaagagatgccggctggcacactgcaggaagagaaaagaaagaaaaatatggtaatcctagtatattacagagcatataatcaaaacctattgcctggtgctctggatcacagagaggggccttggggaggtggcttggttccgcatgttaactgagcatctagtatgcactgggcggtgtgtgggaagacaaagatgctgagggccagtcctccccctgttggagctcacagtccagtggcatcggcaagtgccaacatttatcccacgatgggaggcagtgtagcgcactgttgccactaaccactctgaacttcagtctcttcatcataaactggagataccactggttcctcttagaatcactgggaggactctatgagatggtatcctcaagtgtctctcccatgcgttcacatacagtaaacattcagtgccctttagctatcgttcaagctattggagctacaacagagaaatatatgtggtctaggggaaaataagggctggagggaccaaatcaatggtggggagtgggacgagatggatgtcagagaaggcttctctgaagatctctgccctggtgctgaatcttagctgagaaggaattatggatcctgatcagcagcgaatgggtacgctttctgtgttttcctttggattttacagaccgtgatgattgaggttggttaagggttaaacatcccgtaagcatttctactgggctagttactgtggggaaggttaggattaaggagaacttcagagtgatttgcctgacaatagcagccttcttatctgcccacagttgaaaattcccaccatttattggagcctgttctgtttttcacctgagctgaaggctgggagtgggaggggctcctctgcaaatccacagctgcagaacaacaggtcatgacagctttatctttaaggccaataccaagagaaccagagaagccaaaaagagataactttgaatcccacggggcaagaatgcaccaagcctttttttcccaggggattttatttagctgataggcaaagtctgaagactgggtgctttccccattggaagaactcaataaagtattttgactcagtgcaaagccaaaataccatccctaggtcaaagagctggacttggaagcctgttcctcctgggaagccagcttggaagagtttcttcgagcagccagacaccataggaaagacctctatagatgaatctgctgtggatgagtgtcctatccacagacctttcttagtttggtccctgcggcctgcagccatgggagggctcagtggagactggatgacaggagcaggcaccacttggctgacattgaaaaggccttaacagttgatgtctgagggtgaccacctgaaaagaggaccttgagctgccagaatgtggaatacaggactgcagaggggaaaataagtgtcattttcattccagagaatattaccgaggtgcctgcaaagttcaatcttcctttccaagccttttattcaaactaagggccaggttcaggcacagaaggagcacctacgagctttagctttgatttggtcttaatgcacgcgtatgtcgccgtcgagatttacatatttcttaatgaccagaaagcaacaattagaaagtccaagatcaactctcactacggtatgaatttcttcatctgagcatttttgtaagaagcatggattcctactataatcacaataaaacaataaagatagaaaaaaagatctgggaaagaggactctatttatatgactattttgagactatagttatttgttataaatgaatttgtgaaaatactaataagactagtatttgtggagcacttcttgtgagccaggcatctcatgtgccaagatcaatatagttttgtaacaactctgtgatgttgtcggggaaggtagaatcagcttcatttgatgcgtgtggaaacggaggcttggagagtttaagtatcaagaactcgtggttaaatcaatgctgccttaggatgtgttgcctaagactgaatccctgcagtaaaatgcaagacaaatgagattcaaacagacgtaagatttcaagtggtctccacttccactctccaaggtctcccagccctccctatttttcttgtgaccccctggagtgagggcacagtttgagcatttgctattagatcctcaagaataacagcagtttcttactgaactgtcaataatcctagagctcacagaataccaactccaatgcccatggaaacctggcaggtagtgtaggccagtgaggctgattatgagtaatgactcaaaggagagaacttgcctcatccaaagtaatcagtttccaccagttccagtcagtcacagtcctgtgtggccaaatggtttgcttttcaagggaagccggagattcgcgccatgtgaaatgtcccaatttttcaatcatcagaaattcattcaaaattttaaaaagtaccatcacattgggttgaatttgaccagtgtgcagctacctcttccctagagcattgcagaattcttcacagctagttgactttccgtaaaagcttctgagttaatgagtgaattaattaccaggcaaagagcccatttgaaggctcaaccctttagagctccctttgctgtccattcacagtggttggagccaagcccatcaaggccagcagcaggaagcagagcacctttgagtctgaccctgtcatcagtccttcactctgataagcttggcgtgctagtttccatggacttttgcttgggttaggatcatcaatgtcacccccatctgaattgcagaaccacgttattggcttttggaaagtcccctgagtgtagggaactataccttggtcagatttttcacccttgcaggtcttttttcttttcttgagacggagtcgtgctctcgttgcccaggctggagtgcgacggcgctatcttggctcactgcaacctctgcctcccgggttcaagcgattctcgtgcctcattctcctgagtatctgggattacaggcgcccaccaccacgcccggctaattttgtatttttagtagagacagggtttcaccatgttggccagactagtttcaaacttatgacctcaggtgatccacctgcctcagcctcccaaagtcctgggattacaggcgtgagccaccgtgcccggcctgcccttccaggtcttaccaacagagggctcttgattagtgtctaagtgattgcgggaaattaacactggtccttcattcgttcatttagtcagcaaacatggattgaccatcctctgtgtgctgccaatgagattccagtgataaattacagacctgttggttgcttacaatatgacgggataggtagatgttgacgaagtaactgagtattctgggtttgggaccgggctataggatcctaagtgtaggagtgtaactcagctcagagatcagggatggcccctctgagcaggtgatgggtaaactgaaccctggaggttgagcagggataaagccaagtgaacagtgggagcaggatgtgcaaaggtcctgaggtagagtgaaccaggacctcagagaatagtccagggtggctggagccaagaaatcatgggaaagagtggatgggtcaagctagagacatggttggggtccggatcactctgcagttggccatggtgaaagtttggacttcagcctaaggaaaagagaaagccatagaaggttttaaacaggcatggtgcctgatgatttgcatcctaaaagatctctctagctacagtgtggagaactgataggatggtcaacagtcaatggggaatctcattttgaagctaatgtatgtagccaggcaagaaggaggatggtagcttggaccaggatgctgtgatagagaacggataatgccagggatatatgaaatactcaacaggtagaatcagtgtaactgggttgttgattgactatgagggatgagggcaagggggatggctgtttcgagaaactgtaaggaggtgatactatttgctaagataaggaacacgggtggttctgtggctgtacaattctttgagccatcagttagactatgtgtgaatatcttccccagggccatacaccacggcagccctgggaggaagagtgggaatgggattgggggctggagaaacaaatttagcctggagtttaacaaagaaactagcaaaatatctccaaagtcccatttgtcattcttaatagccatcatacaaaaagtggtcaaagttaggaaattgaattttcaaacacgttaggccttaaaaagaaacaggcctctgatgttaagagagaaacatgcattttcaattgttcagagattactaaatggaaacagttctcttcccctcccccaaacagaagcaggaattaactttgaggctggaaaatgtcaatttactgagaaaggagggtaaggggaacagggagacatcgagaccacatgtcccagctcctcatcccacaggtgttcccatgttcagttgagctcacgatgactggatctgcccaaattcgggacacccatccatgtgatcttacccttcccgccatccccagtgtgggaggagggtgcggggtgagcaggaatcccacccagaatgattcgctgtgatcattgccatatgaacaatatgctatcacagagaaggagggccccgaggaagaaagaatttttttaaatgcctaataaaggggtagaagtactgccccgaactcctgtaaaagcatgttccaaggagagatgagatcaaggatataaaattgttctggttttgaaaacaaagatgccaagacagtaggcagcatctctgggttgcaggatactcaaggaggtagagaaagaaggaatggctaatatttctaagatgacaaaaatatttaatgtggtggaggatggaaaaccttgatcgggtcctaatgagtctaaatcagactttctctgagtctttgaatatttcccttctcatcttgcacttggcatttttctcaatgagggtgtcccttttggttggggaacaagagtctaggataggcctgggcgaggtggcttacacctgtaatcccagcactttgggaggccaaggcgggcaaatcacctgaggtcatgagtttgagaccagcctgaccaacatggtgaaaccccgtctctactaaaaatacaaaaattagccaggcctggtggcaggtgcctctaatcctagctactcgtgtggctgaggcaggagaattgcttgaacccgggaggcggaggttgcagtgagccaagaccgtgccattgcactccagcctgggtgacagagggagactgtctcaaaaataaataaataataaaaataaatgcctaataaaggggtagaaatactgccccaaactcctgtaaagaatgttccaaggagagatgagatcaaggatatgaaattgttctgattttgaagacaaagattccaagacagcaggcagcatctctgggctgcaggagacttaaggaggtagagaaagaagaaattggtgctctttctaagatgacaaaaaaatttaatctggtggaggatggaagaccttgatcgggtcctaatgggtctatctcaggctttctctgagtctttgaatgtttcccttctcatcttgcatttggcatttttctcaatgagggtgtcccttctggttggggaacaagagtctaggatgggcctgggtgcggtggctcacgcctgtaatcctggcactttgggaggccgaggcaggaggatcgcttgagcccaggagtttgagaccagcctgggcaacatagtaagacccctgtctctataaaaaatttaacaattagccaggagtggtggcatgcacctgtggtcccagctcctcaggaggctgaggtgggagaatcccttgagcccaagagtttgaggctgcagtgagctatgactgcaccatgacattctagcctgggtgacagagtgagatcctgcaccaccacccctgccccaatcacctaatacgtttaatagattgagaaaaaaaaaaaaaagagacccctcttggatctaagtgaagaagtgagcttgtgatgaatgtttgttgactgagcaatgacagaggatcacagcacccttgacctgccaggtcacctgatcttctcacagagacacaggtggctcccgattcagacaatatttgaagccctgaaaagcctttgctgcatttccacgaatatctagagtgggctggagaccccttccccgagggtccgctatttctaaccatggattgatcttaagagcaccaaggcctagctctgaaggtcacattcctcaacacagacctttctctaccaagaaagagaaagctgagaattttcccccagaattttccactggggcacaccacattggccttctgtgtgcttgggtttcccgtgcctggggtgtgaggggcccaggcagcttctgcgcagttgagtcatctctcttccatggttccccaccagccaagagaatggtatgaatgtccacaggcggcctcttcatgggggtctcaggaaatgggcatttgagggtcaggtgggtgaccctagtcccccacaaaggtagcatctggtggagagaaaaggttgccctctcctgcatgtggaagaagcttggcaagattagaggtgcctgctccttttggagcctttcacaattatcttcaggacaaagacggccccaacacttccggaagagatctgatactgagatcccgctagtcatggggtgagctacagtgggactgtggcacacagtggtggcctggcgtatgagaagaccaccccccacccaatccacctcccacctcacctgcccacgatgccattgcttcaaatggctttcaacaacgccctccactccacggggtctcccttcttgtagcattttcaactctgcctcaaatcaactctgcactaaggtgtgaaacgtaaacacccccgagggaggaaggcccttccagagtggtcactgggaggcaaaagggcctggcttccccgaatctcagcttcctcatctgagatggtggaaaagatgatgttgactttccagagccatagggagttggaaatgaggtcaggcacccgccacccggttctccttcttcctcttctaaaacactgcaaccaccatagccagtgcctctatgcagccggttacccattggcgtcacttagcctggcagtgctgctaatgaggcctctgtggcctgggcttccggggctgccatctctaatgaactcagccttcctgggagctgcggcaggtcccagcccaggccaggcctgctctcctcccctcccctccaaagaaaacaccatctttccaggactgatggcactgagggaagcttgaaggaaacaggcagggaagacctgtcaacactaattagaaaaaagtggttctcaccgccaaagccctccagcccatggctgctgccaaccaaggcgcccttgtgggctgttcacctgagctgccgccattttcaactctgcattaagtcatccaaggatccaggagacccaacgctagcaaaagaccccacatgctttcttttccagcaccgatagctcttacctcttccctaagcctcgacttctctttctcttctctctcacccctgtgtccccaagaggcagtctgggggtgaaactggtcttagagtctgatagaaagtagaactccagctctgtggtcccggatttgtggacttggcagggtcgcctctgtgggcctcacttcttttctctgtaaaatgggatcataatgccaaccccacaggctcattagggggattcgaaagcccctttcccagtgccctgaacatacagaaactcagcaaacaaatggttctccgcttatctcctccctttccccttctcacacccacactcaccctcacaatgcctaccttttcttggttcttgaacagattttttttttttttttttttgagacaagatctcgctgtgtcacccaggctggagtgcagtggtgcaatcatagctcactgtaaccttgacctcctgggctcaggccatcctcccatctcagcctcccaagtagttgggactacaggcatgcatcaccacacctggctaattttttgttaacattttaaaattttttagaagagatcagttctcactatgctgcccaggctggtcttgaactcctgacctcaagtgatcctcccaccgtggcctcccaaagtgctgggactgcaggtgtaagtcaccatgcccagcccttgagcagatttttttatcttatctctgatcctgtaagtcaggacctgctgcctccaagtccgtggtacatcatctacctgtggaaagttccctgacatcccctgccattgtcccttctccttcgttcaccttacggtatcgattgagagcccatggaatatccagcacttgattgatcaaaagcagacacggtcctgccctcatggagctcccaggcctgggaaaggcagatcctggagagagcagctgtatcccaccataccagggcccacccacactctgcacctaagaggctcacgggtgtttacaatagacagtgcttggtgcataaatcacctcgtttgaccctcagcagcctgggacattggcaaccaggtatgatcccattttacagatgcagagagtgagggccaaagggttggttttctcctccatgttctgtggcctccgacatcagagtctttagtaatgtgtgtctttgtttccaacacagtagcacagaagtggctttaatagcagctcattctaggcagtcactgtgctaagggttttatgagcattctgttgttccagcgtcatgcttcccctggaggaaataaatgctgttccttcgtcaggtttgatgaagacactgaggaggttaattaacatgtccatgactacccagctggtgagcatggggccctcagagatgatccaggtcagccttggcgtccacgccttgtgatgtggacacaggagaaggtagatcatgagaacctgggctcctgacacaagctcagtgggcagacagaagctgagaggaaggtggctccgaggggaatatgaggacgtaaaacatgcgccatgctgctcgccacacttcctcaacgtgcgccatgctgctcatcacatttcctcttgagaagctaccgatttagccttaggctcatagcatctatcttgaagcaggagaaaggggcaggtgggaattcattgtgttcataagatacatgtcagccagagaggctgcaaaagctcaagtgtcctgagaccacagagcacgtcctcctaaagggagggtccgggccaccgggtccagtctttacacttgaaggcgtcacaggccctttcctacagcggtcgacacccaggtctcttccacatggaaccaccatagtgagtgtggtcctgcgtgatcactgcgaccctctcctggacttccactgtggggtttattttttattttattttatttttctgagacagagtcttgctctgacgcccaggctggagtgcaatggcgcgatctcagctcactgcaacttctgcctcctagattcaagcgattctcctgcctcagcctcccaagtagctgggattacaggctaccacgcctggctaatttttgtatttttagtagagacagggtttcaccgtgttggccaggctagtcttgaactcctgacctcaggtgatctgcccgcttcggcctcccaaagtgctgggattacaggcgtgagccactgcacctggactccgttgtgggatttaggaagtggggccaaggaatagtaacgcaggtgggcatacctcatgcttccctgtaggtggcacagagtgctatgcccaccaaaggcacatgacccagacccctgtccttgggatctgccctcactgcatccactgcacccaactaagcgctcttcatccaggctggacacaaggtctccttcaaatacctcttcttcttatactgttgaactttaaggtgctgtccgagatgtctaaccgcagccatttattgtgtctctaccatgtgtcaggcactctgctaaggacatcacggatatctcatttaatctacatggtaactttttgggccgggcgcagtgacacacctgtaatcccagcactttgagaggcctaggtgggagaattgcttgagctcgggagttggagaccaatttgggcaacacagaaagaccttatctccacaatctgctttgttttgtttttaattagccaagcatagtggcgcatacctgcagtcctagctgcttcagtggctgaggcaggaggatcatttgagtccgggacaatgaggctgcagtgagctatgagggccactgccctctagcctgagcaactgagcaataccctgtctcaaaaaaaaaaaaaaaaaaaaaagagacgtctttgaagtcggtatttcttctttgttttgttttgttttgtgttttgttttgttttgagacggagtctcgctctgtcacccaggctggagtgcagcagcgcaatctcggctcactgcaagtgctgcctcccgggttcacgccagcttcctgagtagctgggactacaggcgcccgccaccacacccagctaatttttttttttttttgtatttttagtagagacggggtttcaccgtgttagccaggatggtctcgagctcctgacctcgtgatctgcctgcctcagcctcccaaagtgctgggattacaggcatgagccaccacgcccagccctgaagtaggcatttctttattcctttaatctgatgaagaaattgaagctctgagagacgcctcatgatacgtagctaatgagagtactaataagaggtctagctgaccccagtgcccttgcgtataagcaccatgaagtacaacttctccctccgagggcctcctcatgctgccaggatcaatgccaatcccaattctatgccccatgcgacccccacagggcccggccctcctcacctctccaacttcacccagcatctgcttccatctctcctccttaggaccttctttctgtcccctgaactagccaagcatgttcaagtactttgcaattgctcttccttcttggaactctcttcatccagacttcctcgtcactctgcctcctcattgtcactcgggtctgaataaatggcttgagctgcttgaccgaggatacatattgttactttttgattatatgctaaataagggatagattacttgtgagttttccaggaatggggtgagcaattctcagaactgagggttcctcccctttttagaccatatagggtaacttcctgcattgccgtggcatttgtaaactgtcacggtgctggtgggagtgtcttttagcatgctaattcattataattagcatataatgagccatgaggacgatcaaaggtcactctcgccaccatcttggttttggtgggttttggccagcttctttactacaaactgttttatcagcaaggtctttatggcctgtatcctgtgccaacctcctgtctcatcctgtgaaaaagagtgccttaacctcctgggaatgcagcccagtaggtctcagccttattttacccaatctctattcaagatggagtctctgagtcttaacatttaaatgcattaaaattaggctgtctccatcaaaagtgacacagaggacacaaaggcatcctgcctgcagcctccataaaccagccagaaacatttatagttggtggtctcttaccaggaaagaatgctggctggttgttgtgtcaaaaccgcaaaaggaaggggagcctggccactcttccaaaaagcctgctttctgtttaacccttaagaaaaaaaaaaaaaaaaaaaacccacatccaatggcagttagagaggaaggggacatcatgaggcaatgcctcccgtcccgtcagggcagggaactcagcttgttacatttctctgggttcccttggccaagtggagatccgttcagtccattgggaagcttaggattttatttttatttctcagtactaatgccacctccccttttgctcacaattcctcatctccacaagatcctcagaaaaacccaaggtgcacacacatcacaggtactggttatccagtgtttcagttctcttttgccacgtaacaacccccagtatttttataccacccgtggactctgcttggtaacaaccccaaaatttagcagcttaaaaaaacaaccatttttatttgctcagaattctgtaagtcaagaattctggtaaagctgggctgggtttttctgctcacatgcagccggcaggaactttcatgagactgcatttggacagcagctgggctgagatgtccaaggcagcttcacttgtgggtctggcacctgggtgggaacactgggagcctgaggcctctctctttctctctgcacctggctctggtcatgtgactagcttgggctcctttttcgtgaatctgaagagtgagtgtttccatgacacaggtgaagctgcagaccttttaaggctcagcctcaaatttacccagtgtcactttctctgtgttccgcgagacagggcccacccaaatccaaggtcaggaaatccctccacctctccataggccacatggcgaaagaccatgtgccatggagaatgggaaacatccttgcagtcatctttggacaaacaacccaccagatccaattcccagattagtttggcaaactagagaccacagaatttatgactcctacacatcctgccactaggaggcagtgtgggccccccggcttccctctggggcttttctggagcctgcaggctcccagctcttggcattggagggtacggccagaagcttcctggggcactctcataccttccccggcctttgcacgtgcaggcctcttgcatgacaaacagcttgccccttgctgctcatgaatatatttacttctgaatttaagaaccatgatggattgacatcggcccctgacctcgcagaaatactaaacaaatgagatgtaggtctacagggcaattgctttcttctttatttcctgggctggttactattgattatctgctgtgcactttgttaatttcctgctgacaggctctcttctatgaacagttcctgggaagggtttggctttgttatttttttcctgggattaaggctcagtgtattctaaacaaccccattattcagtagagaatttgttcaactttcttttcttggcagctgatttaccagtgacctctcccaaagtgaagtgacacgtaaacaagacacaaaaagttgactcccgtttaagaaatatttcaaggctagtgatgggtatacattctctcgtgcattgctgatgctaattgcagtgtacctggggttaatgatgattttgcaataacaggtaacatttcactggtgtcaggctcactgctaagtgcttgacaagctttgtctcattaattcctcccaacaaacgcatgaggtatgtcttgatatgatcccaggtattgtctgagtcccaagggagagctttagaatatggaaagcttttagggcatcagaaccaattttgagctaaacgtgtttcttctttagggcttttgagtttgctgttgcctctgcctcaaagccttggcccgatctttgctctctgtgcagcccctctggcttgtcctttgggtcttggctgagatgtcacgtcttcagagatgccctccctgtctcttcccagcctcccctctctcttgctttatctcattcctagcgcatctctctagcaggcatttggaggttgagtgtctcctccactctggaatgtgtggaggagctagtttgtgggttcatttactattgcattagcccaaaaactatctgttgagtgaatggatgagccatgtcctcccactcactgcctggatggccttggcaagttgcataacatgtgggagcctccggtttctcttctgtcaaatggagatagtaattagaatctgccccatagggttggtgtgaaaattaagcaagatgctataaataaacctcttagttctttcatggggcctaggcatttcacaattaagacaaagtactattctagaggctacagatgaaacagaatgaaataaaaaatacgaagtgctcagcatggcacctggaataccatggacactaacaggtgatgatcgtgtatgattttccttctgatattgtagggacaatgactgatgatcaccagtctagagtgaattgagtcctgagctccgctattgactgaggtataaactgataaaagttcaaaatattttttatcttgacttagaaatggaggagagaagaagcagaggattcggtgttcggaaacagcaaaatcccttctgcacttgcagctggagttacaggagcccagagggtgccgagtggagtgggggacactgaaggcaccgagagtaaataacattaaaaggcaagaaacttggccgggcgcggaggatcacacctgtaatcccagcactttgggaggccgaggcaggtggatcacgaggtcaggagatcgagaccatcctggctaacacggtgaaaccccgtctctactaaaaatacaaaaaattagccgggcatggtggcaggcacctgtagtcccagctactcgggaggctgaggcaggagaatggcgtgaacccaggaggcggagcttgcagtgagccgagatcgcgccactgcgctccaacctgggcaacagagaaagactctgtctgaagaaaaaaaacaaaaaacaaaaaaggcataaacctcagtttcaagtgctaagaaatcatatccccatttaaaaatgtcctttcaggtgccagattttaaaatgaattactgtgttttctaagcccagggtcagcttcagaaggggatatttacaactctaaacatgcgtgctcgagcagcctttacaaatgcaaactgaacatctggaatttggcctaatttataagagcaaatgaagatgttgaaaactgaggggtccagataggaggggaccttctcagttctcaaattcaaggttgcaatgttactgacttagaggctagtcagcacctcctgtagtagtttgtacctttaaaacccatcaagaggccgggggcagtggctcacgcctgtaatcccagcccagcactttgggaggcctagatgggagcctaggagttcaagaccagcctgggcatgaaaaacagcacaatctctggcacataagcatgctcaataaacggaagctattgttatttttaaattaatgtgaattcagcccccaatcataaaaaattgtcaataattggtggttcatatacggactgaattccacgatccatgttctgtttatttcaattatgactccaccactttgagttctgtgtctttggacaagttctatcacctccctgagcctcagtgtcctcatctgtaaagtgggcataagaatggaacctgtctgtcagatcttttgtaaaggtttacaatagtgtctggcacatataaagaatgccatatatgtgtttgctattattagcatcaaaattatgactagtaggaaccagcagttatttctaatgccgaagatgggacttccaccctctttaggcaaatatattgatcgataagtgagcagctgcaaatgtatgattcttagctcctcattgaaatgcacctcccggctgggtgcggtggttcccgcctgtaatcctagcactttgagaggccgaggcgggtgaaatcacctgaggtcaggagtttgagactagcctggccaagatggtgaaacaccgtctctactaaaaatacaaaaattagcccggcatggtagcacgcacctgtaatcccagctactgggaaggctgaggcaggagaatcgcttgaacccaggaggcagagtttgcagtgagccaaggccgcgtcattacactccagtctgggcaacagggcaagactccacctcaaagagcaaaaaaaaaaaaaaaaaaaaaaaagaaaagaaaaagaaatgcacctcctatgcaaacttggaccatgcttaaagtgtgttccttcattttagtaattgaagaggcctataaaagcaataataaatatacctaagtttctatggaaacaattatctaattaggttttccctttaatcaaaggagtcccaatctaggaactcttagtatgtttcctgattaaggccatttgtggttttcctgagtcgctggaggaatcccagggtagaggcatccccccaacctcgctgcaaatgttttcattacagattatagcagcaggcctggcggcatctgtagagggctaatttttcctgacagtcctgctgacctttgtttgctgataaccctcttctctgtggtaaccccagcagatagaggcaataccaaggacgtaggtctcatttccctgaagagtagcttctcgagagactcaggagagatgcccactggaggagctagcatgaaaaaaagagaaaattgctgcctttagggggtgctcagccctgaagtgctcagtgcagcctcagcttagattggctgtaacatgtcagaatgtgatgaggctgatatttggagtttgctactcaacatggtccctgcaaaatgccatttccagcacctaatacctgtctggggagagatcagaacatttagttttaatcttaaaggtcatgcaggaattcatcctaataatagagcccaaagccaggcagggaggccagaaaatctcaccagcaggggctccttttgcagactgagccactgcaagaggaagagcccacatgcagagaactgataaaaaccaactgtccttcacggtgaccccgagaagccaagttctgctccaggacttctcttctgcaaaaccaggaccctaggcatggatgcttgcattcaggcatttattgaacaaaaatttatctatgtgccacgtcctgggctagaccctagagataagaggtgaaaagatatgctctctgtcctcaggtgagaacagccaagccaagaaagtgctaagaaatgatcccactgctgtcgatcttagccatctgggtatggagggaagagcaccgtgcctgcctgaagaagtcatggaaggcttcactcaggcggtggccttgagcggggtcctggctgaggagtaggtgttttctggtaggcaggcacggcagaggggctcctggaagacagaagggcatgggcgcacaagagacctggcctggcaggggttgtgatggaagtaatgggggtggaggacttgaggctgagtctggagccagagagactgcgatgaatagaggttatgaggaccaaactggagaggcgaggagagactgtgccaaaagttggggtcctcatctgtggacagcagtgacccctaagaagggttgtaccagtcagagttcaaccagagaagcagacccactaggagatacatattaagagatttgttggaaggcattggcttaggcgatggtggggttggtgaggcaggtctggaacgcacagggcaggctggaattcttggtcaggcaggggtgaagctgctgcctcgggtggagtttcttctttatcaaggaagcctcagctctgctcccacatcctttcaactggttgaaccagacccaccctgattatctaggacagactccttttcctgaagccaaccgattatgggttttaatcacatctacaaaataccttcctggcaacgcctagatgagtgcttggttgaataactggagactataacctagccaagttgacattgaaaactgaccatcagagagggagtctggggaggtatgggctctctgcagaccctcctcctctctccctgcattaaggtgtggcaccataagcagcacccaaagtcactcaagggccgggcatggcagctcacacctgtaatcccagcactttgggaggctgaggcgggcagatcacttgaggtgaggagtttgagaccagcctggtcaacatggtaaaaccccgtctctacaaaaaatacaaaaattagccaagcgtggtggcacatgcctctagtctctggtacttgggaggctgaggtgggaggatcacttgagcccgggaggtcgaggctgcaatgagccaacaccatgccactgcactccggcctgggcaacagagcaagactttgtctcaaaaaaaagtcattcaagtgactactccagaccagagaaagctgcaaattaacaaagggtgattctgggacaggcggaaatacatgtgggcactgggctggagtgatatcaccatgtctgagaatagcctcttctcagcagccccgaatcggaaatacatagttccagaagtcaaatacatcttgattttgatctcggctagactgcttacttttttttttttttttttaagctgtaaaatgagataatgcctcgggggtactttgagagattaagatgtaagcacgggggtgcataacgtcaagcttctagaaggtgtttaaggagtggcgtggaccctaagattcatttggctgcaagtaacagggaccaatgtcagccaagttaagtagaaaaggggatttattggaggaatataagcgtgtctcatggattccaaaaaaagttgacagccaagccttgggaaaactgggaagcaagcaaggcagccctgtggacccccatggaagaactttcccaaccttcccttgggaactttgtcattgactggctcagtgtctctcagttcaggcttttgagagaaataatcttattggatggtttgggtcagatgttctcttggggtccaatcagctatggcctaagagtggtgtcatggagaacaaatatggcgccaaatcttaccctgtggacagaatggatacctcaggggaggcccgttcctctggcgctgtagaaaattgctacacctcctccgcgggagcttcatgttactccctctccccagtgaccttcctgctccgaccctcaccaacaccttctcatcttttccccacctgccctttgcagactttacagttacctctctatcattatggcccaggacaagttatttaccccgtctaagcctcagtctcctcatctctaagatggagatgagaataatatctttcttagagaattgttgtgaagattaaataatatacttccacctctttgccctgatcattgttgttatttccttgttactcaagaagtagaggcaatgtttctcactgcagagctgtgcttcctcctgaaaaatattaataacagcacatggcacgtgaggaggtggaaggcatacgcttccaaaccaactgtctctgggttgaaacctcagccctgccacttagtgtctgtgagacaagttaatcaacatctctgaacttgtttcctcccttgtaaaatgggaatgttaataatgatcttgcagaatcgttgttagaatccagtgacctccttatgggtgtgtgcttagcaaaatgcctggcgtctacagtaggtgctcagtaaaagggaattcttatcattgtaattatatttcatcttattaaagcacttatttagtcagataaactcttacatagcatgactctccaactccatctaaaaacagtctaaatctgatgttactttcttgtcatttgtatcttgggcactgcagtactggctactaattaacaattatagctcaggcgcctgctctccctggtaactctctagttaatattttaagccaggcaatgctgtcattggcttcaaggtcaactgcagtttggggagcagcagcatgatttttgcatatggcattggagccatccgctcttccccgagagtggaggtaatttggaacccacacttcctcaatcgtacgtcctttgtgagcacatagagctgaaacctcacactgggcctaaccgggcatggtgatttggcaccttgaatggattgcaagaaaatcaagctcaaataaggagccactataagcgcatttcattttcatctgccatttacctagaaaggccacggctctgcatctgaataacctgatgcctatctttaaaatgcactcacttgctctctttcccgactcactgaatcaggataaagaaaaaaaatacctttgtatacagcaatgcctgaacaatttgcacaccctgtaattctcagataaccctagcactctcccctcagctcctgcaagacatttaatagaaggatgtggtgctgacatctcatattgtaacaatattgttactatgtggaaatatgccagggtgaatcttctagtaaacagtgaagggccattagaagaaatgtggtgaaatgacccatttctgagccaacgaacagcatacatttagggataagagtcaacattttgaatcatgttttctgcttattagtttccaactcttgacaccaaacatctttagacttagactgaattaggcacactttgctgatgcctttcaacttgggatttcttggttttcttcctggaggacagaatgggccagtggttaacttggagctttgattctgagttcaagtctgattttggtcatttactacctatgtgaccttggatgtattaattatggccaatacatgcgttcacgtatgcattgcatttcacatgtgctgaagagtggaagtaatttacctgtattagctcttttaatcctgagaggtacgacactaagaagtaggcgtttttctcgttactcccatgttacagtagaaaaccaaggcatagtgaggttggataactggctcaaagtcaagatctgatcagtgaccaagctagcatttgaaccaggggtcttgactctggaatccctgctctcagctagtgtacttgggttgatctctttaagcatcatcttttctgtccataaaatgaccatggtactactacctgcttctgggattctggtaaggattaaatgtttgaacaaatgcatgtcaagtgcatagtgaattacctggaatattggtatgagctcaattaatgttggccattacaattaatgttggcagctactttgtcgagcctctgccttgtacgactccaggggcatcactcacagagagtacaatgtgtctggtgctccagggggcctttcactgtgagttctggatgactggcgccccctgcagttgtgcacaacagccctgtggacctgcatcgctctggaaggagggacagctgtctaggaatccgcaatagcccagggaggtgatggtgaggcctgaacgggggtggaggccgtggggagaaaacctggggaaccagttcagtaacaactttgttatcaatgattcaccattttcgaaagatcagtcagacttaggaccatgtcagtggccccagaagaaaaccaagccaatcagcggtgagagccgctgcacaggaatggctctgtacaggaatggctgcatagttgtggggacccagcacaaaaggaaaacatgggaccccttgttcaaaaattatgaatttcaagacagcaacagcagagcattaaagcacacacagggcacttctaagcatggggctctgtgcacctgcctgggttgcatgccagaagccagccctgtctcagtgctaccatcctacccccagccccaaacgcatcagccagggataggcgagtactggctctcgggcctccagcctgcaagctcattcgctcatcaaatttctccctccaggagcacggccaaaagacaaatctgtggcagatggaaaaagatggttgggactccaataggagtaaggcagggaagataaatctttagctcaaatgaattgtgattaaccacaaatactaagaggtgcttcggggaagccggggtgggtaaattgaattcatggggaggcagccttcaagaatagtctctgtccaagaagatcgatgcagcacaaaggcttataaggttttctttctcctacctcaggcttttagagtgatgagccatgagctacaggcacctgtctgcatgaataaaagatgcattgagacccagtagaccctaaagcaccaggcaccaaagggcctccgtcaaagcttacgacccagaggcctgaccgtggtgactctgctgctaccgacactcatcttccaagctggagatggcttttcttctgcagtttcatcacctttaagatacttgtacatgtgggaggtcaccacttgtacacgtgggaggtcacttgtacacgtaggaggtcacctaagaagggaagtggtgtgatctgaggcatgtggacagccacctctgatgtctgggacaccctgagacaccaccatcagaatcccatgggttaagatctcctccagatcatcaatttacaaacgcagttacctttacctgggaaggttacctttaacttcccataatgccttcatgagaacaagtgagtagataatctggctcttttctagcagagtcctgaagggatgggacactggacgggttagttttgatatgcggatgagggtcttacatgtcgggagcattcgttcattccctcatttgatattcactgagcatctcccaggagggggcctactcaggctgagggctttggggacaggaggacgccaggaatctggtagacgggattgtagggagggcttcccaaggcaaaccttgtctgccttactgcttaaaactagagccatcccagagtcagggaagaacacatgtgattaagtcactgtccaataaagtctgtttccacagaccaaatccatccattccggtcagctgatgtgcaagaccctcctcacttttccagacctgcttccctctgcttccccacatgccccactgtccaggcaaatggaaacacctgtgtatgttccagtggctgaacctttgctcctctggtgcctctcacctgaaccagccttgggaagcatttccatctatcgggacacccaccagtcgggacccttccaggttcatctctgattctacattctccatgtctcctttcctgtttcctgtgatcagatgggacctggtccccctttgggcctccttaaaacaaaactttagcacctccctcctgcctatggtgtgttctgtcctgtcctcaagtcatctgtcctcttatctgagtccccattcttactctgaaggcaaggactctaagctcctcattaccaaaaaaaaaaaaaaaaaaaaaaaaaaaaaaaaaaaaatccctagagcctagacagtatctggcacacagttaatatgtttgctgaattaaagcttatgctctggctacaaattgctccaggcacggagtagatgacatctcctaaccaccatttgtcaaaggattcttttctttctttgtggaatatggtctcctataactgagtcaccatatcttggcattccttgaatttctttttttttcttttttctttttttttgagacagagtttcactcttgttgcccaggctggagtgcaatggcgcaatcttgactcaccgcaacctccgcctcccaggttcaagcaattctcctgcctcagcctcccaagtagctgggattacaaacatgtgccacatgtccagctaattttgtttttttcttttttttttagtaaagacggggtttctccatgtcggtcaggctagtcttgaactcccgaccttaagtgatgcgctcacctcggcctcccaaagtgctgggattgcaggcgtgagccaccatgcctggcagcattcctgaatttcttgacccaggatgggatatacatggaataaaggggctttttccacttttcttattttgcaatataataattcatttactggaaaatgtaataattcacataccataagatataataatccacataccataaaattcaccattttaagtgtacaattcagcgatttttagtatattaacagagttgtgccaccatcaccactatctaattacagaatgtttacagcaccctaaaaagcaaaggggctttttgttagctttaagtatgtggcagttcttttgttgggaagtcattcaagcaattttcacaaagttgtccaatccaagtcccgccagccagggatttggcctttcccaccaggtctcctagaattggaggaatccggtgacttctttttttgttctgttgctgaggcagagtgcagtggtgcaatcttggctcactgcaaattcttcctcccaggctcaagcgattctctcacctcagcctcccgagtagctggaatgatatgcgtgcaccactatgccaactaacttttgtatttttaatagagatggggtttcaccatgctgcccaggctgatctcgaactcctgagctcaagcgatcctccagccttggcctctgaaagtgctgggattataggtgtgagccaccgcaccggcccccgctggcttccaagggagggcaggctggattccatttgctgccatctctctgcctccaagtctcatcccaccctacctccacttccttgcttgcttacattgtgcttaacagacaaccctgccctcgaaacagccttgagatgcctctaaatcatcaactcctgttcctctttgaactctgtcccttcacccttaatctgctgggacagcctttttcctgatgcattttattaagatttcatcacccgggaggcagagtttgcagccagggcatcttcccgccagcttgggggcccagataagtggctttggaggagggctgagtcgccaacacctgcacacgagaaacctctccacttgccccttcttctgtcctgaaatgtcactggagcctcatcctgacacaactctttccaaactcgcccactggcttgcttgtgccatcattccaaacacctgctcagctctgctgggccaaggaagcaacacgctgcgcttgttagattctgcgtgacttgcaagcccccagtctctggtcctggtggaggaatgtgcctctggtccctggacatgcctctggcctccctgtcacctccctccacttgcccacaaagtacccaatgacactgcagagaagatgcccaagagtccactgaggacggcgagagtgagcttagtccccaggggaatgcagaaactggagatgatgatggagctgggcgagcttccggaacatcctgttgcagagagcagctcccggcctccctggcacgcttgcctgaggtgctagggcagcaggcacgagccaccagcctttgatccctgcgcacacacagctttgctttcagcagcgcgtttgatcccatggcagcggctgcgggatgactgttgtttctgtgtgatctgccagcagtggggatgggacttggctttctggaggagcagccacattagccggggtgacctcggtcaatgctgcggggacttcagttggcaccactgtgactgtgctttccaaatgcttttcatgttccccctgcttctcatctatacccttccttaccccacccaccccaagcacagggctgcctgctgatgtcagatggaagacttgaatcagaattgccacctggtagaaaagtagaccatccgaaaggtggccatttattcattcattcagttggtggttatttactgagcatctactgtttgccagatgctgtgctgggtgttaaggagacaaaatgtacaagctagcatccctgcccccagtcacctgtgtgcagggaggcagataagaatatcagcttgagagctggaaggtgcaaaaaacccaaatgtccaacaacagatgtatggctaaacaaggtgtggtcaatccatgcagtggattatttttcagccatacaagaatgaagtacttaccaaacgtggtggcttatgcttgtaatcccagtggcagtacaaggttggaagaagtctacagccatctcccaggtacattagaagcccagagggtcccttacctcaacctggaggtttagtggcttccaaaaggagaggaatcttgactagcatcatgaggaaacaatcggtgcaggaaatgggagagggtgtgccaagcagagggaacagcacaaggcacagagacaaacgcaaaggcacagaggaggaaagcagcgtgcatttaaggtccaggacatggctgggcgcaatggctcatgcctgtaatcccagcactttgggaggccgaggtaggcagatcacgaggtcaggagatcgagactatcctggccgacatggtgaaaccctgtctctactaaaaatgcaaaaattagctgggcgtggtggcatgtgcctatagtcccagctacttgggaggccgaggcaggagaatagcttgaacccaggaggtggaggttgcggtgagccaagatcgtgccattgcactccagcctggcaacagagtgagactctgtctcaaaaaaaaaaaaaaaaacattcaggacacagttggcgggactgcatttgggaaagcagccggaggagatgagggtcagcccaggcaggtgtgtgtgtggcatgttaaggcggtggaggccactgatggctttcagcaggataggaatggacccccgacttcggtggcatggaggaggcaaggatggaggcagagaccagttaggaggcaactgcagtggcctgggcaggaaatgatggcagagcaaatcagcaccaggcgatggcatctccgggggtagcctggctttgctagaccaaggaaagagaggattgagagaggagccccaaggacccactgcattttcccaggctcctttaagatgtttttccacatgcacggcacgtccttgtgcttcgtggctgacttctgcagcgcctactccatgcagcttagaagttaggggctgagaatctggaggcagaccagctgggttcaaaccccaactctactagctattagctatatggccccaaaccaattcattcacctctctccctgtatctgtttacctagctataaaatgggaatgggcataacaagagtacctggttatagggttattgtgaggattaagtgagtgtgtctgtgcctagaatggtgggtggcacacagtatgtgctccataaatgtttgctttcattcttcctgctcagagctttccttacgctctgtgacttgagacagatcagaacagggcctagtttgtatttggaagccagtctttcattcttcctgctcagagctttccttacgctctgtgacttgagacagatcagaacagggcctagtttgtatttggaagccagtgagacctgagatataaatcacacttgtgtgccttccgggtggctcctcctctggcaaacaagaccaccctccccaggccgtgccctcgcctgttaggggccccatgaaaccacacagcccgcagcctccacctgaggaaattaaaaaccagattggttatttcagggtaatcaaaagtaacaccacaggtcctgaccttttgttcacgagcagttacataagcagcgtttgctaaaatctcaccttgagcctcagctctcctctcctgtgctcctcaggatgcaacctggtttggaggtggcatcctgggcccactctccaccggttcttctagggtgccctcttgtaagtgtagctgtaaagggtcagcaagagggcactcatttcatggaaagcgcagtggggattgctgactctcatctaaacccgacagagttaggacgcaaaagagatgtggaaatccctaaaaattcctgtggcatccagaatgaaacctcagcaaccatccctggtagagtgtctactaccagaaccattggccatcatccacaaactgtcaacaggcaacagatctctggatttggagcactgccattccaaggctgtgggcctttatcttcctgaacctcagttgcctcccctactaaatgggtgtagccagtggtgtgctggtaagtgttgaacaaccagttctcactgcggggccagggtaggaggcagcggggaggctggtgtgtggtgtttgccaatttccttgatgtaaatacttaagctacttacttgatgtccctgatggcagagtcatgggagtcggctctcaggagccagtgaagtcagctcatgcacaccactgggtatcagtaagtacttcacaggctgtatgggtgtaatggttaatactgagtgtcaacttgatttgattgaaggatgcaaagtattgtttctgggtgtgtctgtgaggctgttgccaaaggagattaacatttgagtcagtggactgggcaaggcagacccaccctcaatctgtgtgggcaccatctaatcagctgccagcacggctaggataaaagcaggcagaggaacatggaaggactagactggctgagtcttccagcctccatctttctcccgtgctggatgcttcctgtcctcaaacatcagactccaagttcttcagcttttggactcttgaacttacactagtggtttgccagaggctctcgggcctttggctggagactgaaggctgcactgtcagcctcctccttttgaggttttgggacttggactggctttcttgctcctccctcttcagcttgctgatggccttttgtggggactttgtcttgtgatcacgtaagtccgttctcctaataagttccccttcatgtattcatctatcctattacttctgtccctttaggaccctgactaatacaatgggtgaaatgagaagcagtccgtgaaagcttgtgttaaccctgtaaggggtgtgcagatggactccacagagagcacaacacggggtcttagggaggtctggaaatgagcatacgcctagatgtaatctcttctgtgtcaggcacatagtaggtacttgtcgatatggatggtagcatggtacttgtaggtaggtactatgtactgtggagatggatttaagaggctttttatctttgatggattcacagatttgctcccctccttgcagtcgtttattttcaaattcaggcttcatggcgtcctccaaatgcatgctctttcccatccatcagaacctgcaaaagtaacctaaatctgcccaacctcgctcccacctactgccctgtgggatctggctctcacctcctctccattctcatctgtccctgcatgagctggtgctcattccacaccagcccctctggcctcattccacaccagcccctctgacctccttgcttttcttgtggcatgacacacattgcctccctcagggcctttgcacatgctgttgccttggctgggatgctgtttccctcatttccccatcactcaggactctgcacaaaggtcacctttcagaaagccttgtctaacacaggaaaccctcaccggcacccattcttcctccccggggcctgctgtgtgtttctttctgccttctatactgtacatttgctgtgtgtttctttatggcctatcctccccaccgcctccactagtggtgaactcctcatgggaggaatctatcctctgcctgaggtaggccccacttcgcctctcttccttcttggacttggcccctccagtcggacatgctaggtaagccactttctggcctccgttctggtcctggttcttctctccctcagagatgtgtaatcccacagataagcctgggtctcactcctgcaaataagcagcacatgcctcaatccagggctgggcatggtcctctcaggcaccctctccccacccacacccgggctttcccagccaaagctcaggccacctccgttctccaaactcaaggcccatgtcttagtgaagccacgtgtcatgtccccatcctgcattcagaccagcctgtgacaaccacatctccaccaccccgccttcacatgagctccatggctccacagaccttgtcctgcccagctctgattcccagtctctagaacaaagcctggcacatggtaggtgtgcgctacagactagggaaactgacaattcttcagacagtctggaatcgctggagagctccaggatgcgtttctgttacaaaaagggtatagacgtgcatggttcggctcagctctatgtatcgccgtattttggaagatcactgtctcttcatttgtaagcatggcaccagggaagactctccattgggtgtttcctcaaagtactgcctttggcataacacgagagtcctcgcccccatcacctgaaggagtgggaaaggaaggggtgagtttaagaaagacacaaacttgactgaaaggagaaagagtctcgaacagatggcacaacctgcccgtttctccacagcatgactgtgacaaagagaaggaagacctgagtccactcagtggtgagggcagctcccaggtaccccatgtaaggaaaatggtgaagacggcctgatggacttggaagcagtgggttaagctatgttgatgtatcatttggtggccacttaggtaacacacatggaggtagaaagggcagaaaggtggtgctgggtttttttgttttttggtttttgtttttcagatggagttttgctctcgttgcccaggttggagtgcagtggcatgatctcggctcactgcagcctccgcctcctgggttcaagtgattctcctgcctcagcctcccaagtagctgggcttacaggcgtgcaccaccacccctggctaatttttgtatttttagtagagacggggtttcaccatgttggccaggctggtcttgaactcctgacctcaggtgatccgcctgcctctgcctcccaaagtgctgggattacaggcatgagccaccatccctggcctatggtgctgtttttaatttaactatgttttgtccaagaagcgctaactggagactctagcagtgggaacctggaagccgttccaggagatgagagtctatgaagagggatcgatgtgaggggattagaaagtgtgttggaaccaagaatgttaaaaggccaagtgaagagttaaagagttaaaaggcggaatgcagagttaacaatacatcgaatcaagaaaaatgagggcaatctcattcatttttatcactgatctcactaagcttttttattctattctgcaaatagaggttctatagcttcaagacagagtgtcggccctggagtcaggaagatccaggttcaaattttagctccaccttggactagttacggggccccaggcaaattacctctccaagcctcagtttcctcatctgcaaaatggtcatcacagcatgtctctttcattgagtagccgtgaggattcaatgaaatagtccttgtggagtgcttagtgcaactcctaactcaacacttaaaagatgccagctctcatttattcatcaaaaacacgatgcccacgatgtgccaaggaacccttcttggtgcttgacaggcactgattcagttgctctttgtacactgggaagaagggactcctatctcccccactttacagatgaggaaactgaggcacagagaggttaagaaaactgtctgagtcatgcagcttgtgagtgccagaggcaagtttcaaactcacgcatgacacctctgggctccctgttgctgccgcttacacagttttgggtcacctgctccatgctgagcctggcactggagcatcaatgcaaacgggaaaggagtaaaaccacggtgctatctttacgttgcttgccctcttagtggagggctcactctctcctggagcccacacttacaaagtagaacataattaagtagggcagcatccaagcaacttgaaaatgtcagtcagtaaacatctcttctccacaaagaaatcaatagccctcggaggtgatctttgctttcttttttctgtttctttcctttttttttttttttttttttttttttttgagacagagtcttgctctgtcacccagtctagagtgcagtggccctatctcggctcactgcaagctccactttccacttcccaggttcacgccattctcctgcctcagcctccagattagctgggactacaggcgcccgccaccacacccggctaattttttgtatttttaatagagatggggtttcaccatgttagccaaaatggtctcgatctcccgacctcatgatcctcccgcctcagcctcccagagtgctgggattacaggcgtgagccaccacgcccggcccactttcttttttcttttcttttctttttcttttttattttatttgagacagggtctggctctgtcacccaggctggagtgcagaggcatgatctcggctcactgcagcctctgcctcccgggctcaagccatcctcccacctcagcctcccaagtagctgggactacaggcaagtgccaccacgcccagccaattatttgtttgtttgtttgtttgttttttcatagaaatggggttttgccaggttgcccaggctggtctcaaactcctgagctcaagtgatctgcctgcctcagcctcccaaagtgctgggattacaggcatgatgagccactgtgcctggactactttctctctgagggtgagatgaacagagacccagtaagacatgtgttcgttattttaaactgctgacatttgtggcattgtttgttactgcggtataacctatcctaccctgtttaaggccccctcttaatactactttacatctcatttgtacaggatgtgttcagaatggatgcgcaatgaatccttcttaagttgaggtaaactccatcaactgaattgcttcagggctgcagaagctgaaatgggtattttcatctcttcatccagaaaggcttcatttgggacacctgtgggaatgcctgttccgctttcacgttagccaatctttaaagctttcattagctatgataaattattcaaaaaggaggaacacttgaaacctctttagaatattgacgtggaccgacagtaaatgaatggaaaagtacctccaggttcgaggctaactttcatttaattttttagaggaaccagtcgagttgttaaaatgatcagaaacgggcctggccagagccagctcttcaaagaggggatgttattacctccttgaccattcacttaatcagatctggtcgatgtcaagaaaacaaaattcctcgtgcgatggtgggctcaggatataattaacaagcggattttacttttacccagaaaccccttaagaactttttttttggaaaagtaggcttcaacgaaataaaaaaatttaatgtacaatttagtttcatttctgaaatcttacacgatattttataggaagccttggagacccccatcagaattcctctccttgagttcatttttatatcttcatgtttttctaatgaaacggtattagataatagatgtccccgaaggccatatcaaagttataagtatctgacatgtttcttctcctgaattttggagatgttgtcagactatctgcatatctagggaagtatgagtgtcgtggggactcaaggcttggatgtattgggaatgggatggcaggtccatgatgagccagatgaggagacagcagagatttacgggaggcagaatcctaacccaaaagtaccccaaggctgacccagcatggcagatctccaggtttttgtgatcccaaaaccaagaaccacatatgactcagcaactccattcctaggtatacatccacgagaactgaaaacgtgtgtccacacaaacactcctatgagcgttcacagcagcattattcatgagagctgaaaggtgcaaataacccaaatgtccaacaaaaggtgaatgaataaacaagatgtggtcaatccatgcaatcaaatatttttaagccataagagaatgaagtaattgccagacacggtggctcgtgcctgtaatcccagcactttgggaggccgaggcaaaaggatcacttgagcctaggagttcaagactagcctaggcaacatagtgagaccccatctctactacaaaacattaaaaaattagcttggtgtggtggcacatgcctgtggtcccagctactctggaggctaaggtgggaggatcgcttgagcctgggagatggaggctgcagcgagccatgattgcaacaccacactccagcctgcacaacagagtgaggccctgtctcaaaaaagagaatgaagcacatgctacaacatgcatgtcccttgaaaatgtgatgctatgtgaagccagtcacaaaagactacacgttgtatgattccattcataggaaatgtccagattagggaagtctgtacattaggaagacagaaagtagcttcgtagttgccggggactgtgggaggggaagtggggagtgactgctcgtgggtaggggtttcttttggggctgataaaaatgttctggaattaggttacggtgatagttgcacaacctcatgaatatgctaaaaaacactgaattgtacactttaaaagggtgaattttatgatcgatgaactttatctcaaaaaaaaaaaaaagaaatacgtgggagaaaaagagtcacggggcgcagagggtggtgataagaggagccgttctaatcgtcgcggcaaagcagaggcaggcagtgagtggggggctttccggcagctgccctctcgagccagtcggagccgtctcagggtgtttcagcatcatcgtggctttctctctccgtcaccgctcagcaagctcctcggggaaatgtgcgtctctcctgagtccagggagtcaaaaccaggagaaagtctgtgccgttatgactggctgactggcgctcactgtcggtttcgtgacgaggggtggcacgcacaggtgaagccaggtgtgaggggtcaggcaggtgacgacacattccgcagtccagagagtggctgggtcccttctccgcaggctcttggggctctcctaggactgagagggtgatttaggatggccatcctccataaaacctacacctccccgggaaggagcagaggcctccccagatagtggccgtttaccatgccctgggcttcctcaggagggctatgacggcctggcctgctccgacacagactgctgatgagtttatgtacttgggctgcaaggtctctcctaaagttttttttgttttttttgtttttttgttttttttttgagtggagtctcgctttgttgcccaggctggagtgcagtggcttgatctcggctcactgcaagctctgcctcccgggttcatgccattctccttcctcagcttcctgagtagctgggactacaggcacccgccatcacgcccagctaatttttttgtatttttagtacagacggggtttcaccatgttagccagtatggtgtctatctcctgacctcgtaatccgcccgccttggccttccaaagtgctgggattacacgcgtcggccaccgtgcctggcctctctcctaaactttttctctgcgctgaagagagctgtcctctgagcccttcctctgtcatgccctgctttttagaatgatctcgtccagaaagctttcgtcgactctctccatgtggtagttttcaaaattgggacaatggccgggcatggtggctcacacctgtaatcccagcactttgggaggccaaggctggtggatcacttgaggccaggagtttgagaccaccatggccaacatgacaaaaccgtctctactcaaaatacaaaaattagccaggtgtggtggtttgtgcctgtagtcccagctattagggaggatgaggcaagagaactgcttgaacccgggaagcggaggtcgcagtgagctgagattgtgccactgtactctagcctgggtgacagagcaaaactcttgtctcaaaaaaaaaaaaaaaaaaattgggacaattttgccacccaggggacactgggcaatacctggagatgtgtctggttggcacaactggtatgggggggttactagtgagatctggtcagtggagacctggaatgctgctcactgtcctactatatgcacggaacagcccccataacagagaagtgtctggtcccagagcgcagccgtctcggggctgggaaacctgctcctgtgcttccacgatcagggggttgcttcccggcaccgctgttcacagacactgttccaacaccatgagtttacactggagacttcttcgtagacacggaccctgttgggccagctggcctcttttaagggttaaatgtgatgattaacaggacaaggagcctgtcacatcatgagcactcggtgatggagcctgttattcttatcactgttgtcttgggagggcactcagtggaacgagaagggaacgaggagtgagcagcattggcttgaatgctggccctgtccccaacccacagaggggctgaggaaagccacctacctctccgagcctgattccttcatcgcaaacatggaaatattgctttctgacccaccctcctcccagtgtgttcatgaagacagagttacattatgtatgcaaatgtgatttaaaagagaagtgagagatacatgttattgtgcctaatactacatcatggctaccgtttactgagggctccttataagacaaacgctgtgctaaagcctcccttcatctgcgcagtgtctgctgaggaaagtattggtgtccccattttacagaggaggaaactgaggcttagagaagtgaagcaagtcatcctcaggtacccaggtggggattagcggagggggattcagccccggatgtagctgacctgtttcttcactgctgtctccacgattggtgagtgatcagtgccagacccgactgtccctcctgtccctggtgcatgagttggccctgatgaaagttcaggcatcgaggtccctggaaaaggaccagggagtgagatgctgaagctgccatcctccttctgaccctgatggcaggaatgtctagctgggcgggagagggccccatgccaatgttgcctcccacctggagcgagtgctcagccccgccctgagtgcccgtggctctggctgtcctccatgaatgatgccccagctccgtctctccaacagaaattaggcagagccacaagtgggcccccaaaatccctcttcctctggggagtcactccagtgctttacgacggcacctcccgagccctgctctcacggcctggagaggcgatgccaaggctttccttcaccctccccttctccacggagggctggcactccacattggcgctctggagccactggatgtggtcagcaggcaggagccttggtggccttccttccaatccatgccttcctcttccatgtgctaggacttaaggagccccaaggcagatcctgtcctccagtgaacatggtgcatttcatcagagcccgctcacaccccagcacccagaaagataaacactgtcccctagtcctcacccagtccctgtccttttccctcttctcagcctcttgcctgatcttgtgtcccattccaatgcctgccagctcctggcctagcaagctttgcccccaggtctagctccagggctcacaaatggttctgttggacccctggtgtcatctttggacatggtctgtgctgtccccctccacacttggctcctggcaattctgttgggcaggggtctttattgcaaggaagagaggccagccctggaaacaaacgtaagcaaagtgggaaattaattcagaggatctggcagagctccccagtccaaaggaaagctgatgagcaaggcttggaaggctcaggtcttgggcagccaggatgccaggaagcagggaccccatggatgggctgggtggggcttacaagcctctggcttgtaagtccttgtgtctccccactcaaaactcccatgccaggaacagagggtctgttgggctaactcgggcccagtggggtcagccagcctcaaccatatgagttgagagtacaggggagatctcccacaaaacccgggtgctactaccggaatagggagatggaggcaaaatagcagatgtcaacacatcacccctgtttaccaagccctgacccccgatgtacccaatcctcagctttgcaatggaaaaagaggcctccccacgtccagtctttttaggagagacacatcaggctctttggttcaacttctgaaaatgcacagatacaggtaaggagtcaacaccacagagactctggcaggatgctaagttctgagtggcagatcaagacgagctgtggtcatagccaggctaggaatggtgcctcagctccacggctccctctggggacccctggaggaactccccagagggacagctaggcgtaattggcaccacatgggtggaggtcttggtgaccagcttggcatgcccgtggtctgccatgttcattttgttgacatttaattattttaattatttccttttcatgtttgatgtggggcaagccacttgctcaaactccctggacctcagagtcctcctctgtaacatggggagaaaaccgtacctgttgtgcaaagtgactgcaaaggttgaagagcgtactagtcggggtataggtgaaggtgctggaacagaagtcctggaaggcagtaaacaagctacaagggtgtttttctcttctgtgagagtccagaggaggtggtccagggtagctctgccccatgaggttgtccagagacccagattccttctgctttgttgctgtgcctcacgctggggtgttgcttcagggccgaagctgactctccattccctttgcagcccacagcaggggagaggggaggtagaggcagtttctttaaatgatgtgatctgtaagtttacccagctccaccagtcgttttccattggccagaacgtggctgcacttagctacaaaggaagctggaaaaatggaatatctgggttactaggccgggtgcggtgtctcacacctatattcccagcactttgggaggccaaggcgggcagataacctgaggtcaggagttcgagaccagcctgaccaacatggtaaaacccgtctctactaaaaatacaaaaattagcccagcatggtggctcatgactgtaatcccagctactcgggaggctgagaaaggaggagaatcacttgaacctgggaggtggaggttgcagtgagcagagatcgcgccaatgcactccagcctgggagacagagcaacaccccatctcaaaataataataataataataataataataataataataataataaattaaaatctggctagataggtgggagctggatctggggggaaaggaggtggagagaatattccataactgcacttgaagggggtgtacatgctgggaggcgattgcagtgtttgccacttgcaagataatacaattaaagaacaactagccttaatgtgcagtaagggctcagtggatggtaaaggttgcttttagaattcttcctcttaggaggaacaggcaaagcatctcttgtttcagtgttcctggaggccagactataacataaatgtgagggcatggcctttgatggcttttccaccagggccctgggaccactggaggaactccccagggttcctctggcctttagggaaaagcctgaagctcctcaagggtgtggccaatctcccccaggtactcagacacctctgttccctttgtctcagcatctgatgccagctcgttaatggttccatcaccccacaggggcacctagacatgattgacactccctgggagggggttttggctagcagcttggcatgtcagtccatggcctgccgtgttcatttttttgacattcaattatatttcttattttatcatttggcagaccagcttcctggcaagatgctgaattatgcttgaagccaatcatcccctgcagacaccttctcatttgggctttctcagccggatggctctcagagaacaccaatgaggggttgattggcaggagagatcctgggagtccaagggaatatgcagacaggcactgtcttccattttcttcatgttgtctgcccccattcagaaacacaccaggcttcttgactgtgctattattaaggaatttgggtacatttaattattcattgatctgtgcagaatctaacacactcccaacctaaccactaccatccctgtctaatcttgagctactgtcagggagtagcttgagaggggcttattggcaccctctgctccaaggtttggagccactggactgagatgtggcagaaccgagtttgaatccagatagtctgggtaacatttgtacccactctgcaggagcatgtggaatatataaactcatcaacaatcccactcttgttctcacatgcccacctatcttgcagagaccagaaagctggagctttgtgtcaggactcccttgcagctagggatctgcatggatccaggtttggccaacagagattgagatggttggcaggaggcagaggccacttctgctggccagcatgttgctgaggcacttggtttctctgtggccgtttcagcagtgtccctatgccctatggggcttgagaagtgggcccagcacatctattttgctggtgcagatctgggcaggcacaacctggtttcaggacaaccagcaggagggcacagcttcctgactgtggcagaggacattaggttctggggctgcctgggtctgattcctggaagaggcagcagccaccttgggggcccagttcagcagtgtggctttgcgagtcattctgaaaatctctggtttttcagctcttcctacaattccataagccacttagtatcctgtaataaataccttcttgcttgaagtagccagaagagtctgttctcttaactgactctggtcaacatgatgctaggccaaaatatatttattactgataaaactaatcttgaggtccatgcatggtggctcacacccgtaatcccagccctttgggaggccaaagcgggaggatcacttgagcccaggaatttgagactggcctgggcaacagagtgagactctgtctctacaagttaaaaaagaattagtcgggcatggtggtgtgcacctgtggtcccagctactcaggaggctgagatagtaggatcatctcatctcaggaggttgaggctgcagtgagccatcatcacgcaaccacactgcagcctgggtgacagagtaagaccctgcctcaattaaaaaaaaaatcctaatattggggaaggtagtgtgtatctgtgggcaaatcagcccccaaattagacctatttccccacccagacacaggcaaccctggcttggagcagcctccactcccctagagatagagcctgcccctcaactacaaaagtctgtggaggagcagagcagatcatatgccttctgtaggcagctcactcccaagacaaaggagcaaggaaggactggctccattgtgctcagttctttagcctatacctgccaggcaaataaaccagtcccacctggggtggcagtgaatgaggagattatggatagagttggctccaagtgccagtttccaacactgagatactgtgagcctgtgaatagagattgtgagcatgaaattgctgtgtgaaagcaaaggcggtgtatgttctagaccatgtgactctgggtgcaataaacagagtaaaagtttcctttgtgcaactctcaggggcaggagacattgttccagattaaagaggtttctttttttttttttttttttttttgagatggcgtctcactctgtcaccccaggctggagtgcagtggttcgatctcagttcaccgcaacctctgcctcccgggttcaagcaattctcctacctcagccccctgaatagatggtattacaggcaagtgccaccacggtcggctaattttttttttttttagtagagacggggtttcaccatgttggctgggctggtctcaaactcctgacctcaagtgatccacccacctcagcctcctaaagtgctgggatcacaggtgtgagccactgcacccggccaaggtttctaaataatggatgctttgcctctttcagagatgacatgtctcaaagtcttagactctgggggatgtccatctgagatgtattattacaaaaagaaattataatatattatttgagatactttgggccacagataacagaatacccaacagagtcttaaacaataaataaatctcatttcttacagaacagaaagtcttaagttctcagagttggtttagggctcagcagtgtcatcaaggactgacattcattctgtatttcctcccctgaatcctagcacactggagaagccttccctcatggtcacaaaacggctgccacagctccaagcatcacatcataaacccatttccaaagcaggaaggaaggggtggtggtaaaacaacaacaacaaaaagagtttctagtcatgtgactctctgcttcatcacagaggagaatctttctcagaaattcctaagctaattcacccttacattttactgaccagaacagggccccaggtctattcctagaaaaaccactggcaaggaggaatgggacgctgagggccaagtttggccagtcttggggctgagcacattacctcccaaacaaaatcagagcctggtggcacagaataagccaagtgggtgttgggccgggaagcggtcatcagtgctgtgtgatgcagaggtgtctggagaggctggtgaggtgaggggcaggcaaccatttgtcaggagccaaatgcctagacagctgtgctttctgaattcttctctccctctgtgactttgctcttcctccctcaccgtcaggctgccaggtgtcacttcctgctcacacctatgtgccggttggtaccaacatcacttcctgcttttgattttttcctttaactggatgtgaatgtagaaacttgcaagggtgcaggggagtgcactgattggactctgacagtgtgttattgaattccaagtgccctattctgaaagtatttccgaatacaattgtctccagagctggctagagccagaatcctatttggtttgattttttaaaaatttctggtaggcagaataagctttactggagtaaccccagccttggagggctagggtatgaagccagcatgtacagtgctcgccgtgtgggtggtaggcattgctgcatgcctgtagacccgggagatggcagtggctgggaggcttgcagtctgatgtcaccccatcacaggccacagtgctggtgggtctataagccaggtcccttccaccaggggcatttccaccaccatcaactctgccaaggatcatgaaaaacataatacaaggtaacgggctagatcaggatttctcagcctcagaactgttgacatttggggctggatactctttgttttcggaggctgtcttgtgcattgcaggtgcattatagatgtttagcaggattcctggcctgtaccctactagaccccactagccaccacttccttacccagtaataataatgtccctagacattaattatcaatgataatcactaatcattattgatcaatattcatgattattaatcagccccagttgagaacttttgggttcaagaatcatggactgggaggccgaggtaccttagagggcaggaccttccctgaacacctttcctaagggagcaccgcacccccatcacctcatctctctccaaccccgtaccttgcttgcttttcttcagaactcttatcatccactggatttctcttattttgtttatttgattgtctgttggctgattttctgctcaggggcctggaccagatctgccttcctcgttgtggcatcctcagcccccagccattgtttggcacagtgtgaggtttagcaaatgtcagcagaatgaatgaatctcaaagttccaccagagattcccaaaaggaatactttaatgagtgtccactccgctctagacactctgatggacatgaccccctcccaccccacattagctcattcagtcttgaaaataaggaagctaaggcacagaaaagtctagtaccaaactgctagcaaatgatagaggcaggatgtgaactcaggcctgccggattccagggtgtggcttgttggggacaccaggctgctttcccaaggacatgagggtggcctagaggagcggcctccagacctctgactgggggcatcctgcaagaaagccgagtcatgagaaaaccagcctcccagggtggggacaggccaggtccagccgtagcctgccagcccaaatgggccaggaagtcagtgctggggccttggcactgcctggagcaccatggccagcttgtccttctgagggcataggacatccaaggccctagacaacttccgtcttttcagatttggagatttatggaccaactgctctttggtggcctccaaaatgtttctttttctttgcaaagggaaaccacaatccaaatctttcaaccatttcccccctcaaagcaacatgagaaatgtggtccagaggaattcctcgccctcccccaaccgacagcacaattgtcagaaaactctgagatgaaacaggatttttgtggtgctttttcttccccaccctgtcccctcacagtaattagcacgtcagctttctcttgtggtatttatgtgtttatataacacagttcattgttcccaaatgttagtcaactccaactataaatcaagccccaaatcttgaatctcattcaaactcacaagttgatgctacacgaataaatcataagagggtgggaatgttataaaagtagaaaacaattcagacaaacgctgtaaatacagctcttggaactacttagtgaatacgttaaaacaattaaatgccttgtgcaacatcgaatagtagatcagtattttaaatgaagccatttgaaagtttctttggctaagaatcattaatattttcagtgctttacagttcgcaaagatttttttgcacattgtttcatttactctcttacaaccttcttttaatgtagggaagcaagctattttactaaattctatcaattctaaagcacacgttgttctcattttttgtctctgaaacaagaatgcatcttcatattaaaggcatggtagttgaattggcagctttgttttcttagtgatacatcaaatgatagtgcatgttataaatgatggtgtcctagatttaatgaaatgcatattatgatgatccctgttgcacgggggaaatgacaaaccctgagatgttacagacttggcccaaggtcacgcagtgagtaaatggaagaatgaaaacttgaacctgagaagggcaaggtcttcaaaatccatctaagtaccccaaggatggtcctgaactgccctctgcagatggtgatcccgataactgaagaacttttgtttttctggaaagaggatgtaagtttggagccagagcagaactgcttaagatgttagaagggacaccgagagctgtcacatctttccccacctttcccttgaaatgttcagcacctcctcagaatattgaggtagcattgctttgaagggtgtcccaggattagtctcttctggcaggccagccctctgtgactaccttgagcaaatttgatgacaccctgcctccaggtggactcagtcccacaccatgacacggggctcacagagaggagctcagactacatttcaaccccttcactccttagctggtctccttgtacagtgcacatcttgagcaactgtactcagcatccctatgcacagggcacccacgtgtcttcaactcgtcttcagtggaggggtggtggaacaagcatgcctgacacagagaaggaagatgtggacaaattcagcaattatctttctgtcccggatcacattcatttttcaagcctggtgggaattttttgttgtgttttgaaatagagtcttgctctatcatccaggctggaatgcagtggtgtgatcatagctcactgcagcctcaaactcttaggcccaagcaatattcccacttcagcctcctgcatagttaggactacaggtgcatgccaccatgcccagctaattttttaaattttttgtagagatgaggtctcactatgttgcccagactggtctcaaatcctggcctcaagggatcctcctgcctcagcttcccaacgcattgggattggaagtgtgagccaccatgcccagacttaagcttgatttgtcttctgatgaagttttagcctgtgaaaactctgaccaagcgtggctggcagaaaagaagtagaatccttgaagaaactcatagccttaagaaattcagtcttaattttaatggtctttctgggcctgtttctgaagacatgccctattagctaacccaaccaaccatttgcattagcttactggtttgaagtactacttagtcgggtagaaagagcttgtacttggagcttattcagagttgggttcagatttggatctctgtttctttccagctgctccctctgaaaaagtgctaaatgtcttgaaacctcagtctcttcatcaatccaccattcatgggtatggtggattaaagataaccacatattctttgctactcttttctacttgagatgtagaatctaatctgccttctcttgaatctggattaatgacttgattgagtaatacaatgcaacagaagtgcatatggggacttctgaagctaggtcacatatgaagccttgcggtttccacctgaacttcttggaacgcagctgccatgttgtgaggcaacccaagctgcccatggagaggtctccatggagaggaaccaaggtttgaggctgacagccctagctgagcttccagctgaagccagcatcaatttgccagccatgtgagtgagtcatcctggaagcggatcttctggttcccatttgcgacccctcggttaatgccatgtggagcagagtcaaactgtcctcacccaccgctgcctgaatggcagagttgtgagcaaaataaatgactattgttattttaagactaatagaagatatagccttccaccctaggtcatattcacactcttttgtgaccatgggaagttgtcagcatcaaattcaaggaaacttcctctagtggacattttggaatgtatttccatatgttctagaatggcttgtcatgcagccatggatacatggaatgctggagatgaaaataatacctcattcaggggtcgtgttgagaattaaacaagacagaggatgtagagcatttgggttgctgtccagtgcacagtgggcacctagtgacccatacaagtaggcagcacgtgatctgctaagtactaattgttctgtcccgctgggatgagcttactcatcccccaggaactgggggccagggtatcaccataacttagagggtattagacctcaccttgcctctgtcaatgggtgatgccagcatcgtcagccattgtggagcacatctgatttcaggtgaaaatcattagaccctctaccttgatgtccactaagggaagtttccttggatgtgaagccaacaacttcccttggtcacaactgagtgtgaatatgacacatggtcaaagactggatcttttttattattattattacttttttgagatggactctcactctgtcctccaggctggagtgcagtggcaccatatcagctccctgaaacctctgccccccgggttcaagtgattctcctgcctcagcctcccgagtatctcccacgccaccaagcacagctaatttttgtatttgtagtagagacggggtttcaccatgttggccaggctggtctcaaacccctgagctcgtgatccacccacctcagcctcccaaagtgctgggattgcaggcgtgagccactgcgcctggccaaaggctgcatcttctattggtccctgctgccagtctctgccccgtgctctgagcacagacaaacaggagactggccttgcagtcaaagatgagaatcctttgaaaacccagcaagggctcctacctggccctgttccagagcaggcaccatgtacccatggggtacaccgaggcttccttgggctcctggtgcttgttactcctgaaatgatcccaagcagggctccagcccagcaaggagtaatggaaggcattaggggcatttgtgaccgtgggaagttgtcagcttcaaattcaaggaaagtttccttagtggacattttggaatgtatttctatatgttctagaatggtttagcatgcagcatggatacgtggaatgctggagatgattaataatacctcgttcaggggtcatgttgagaattaaacaagacagaggatgtaaagccttgggttgctgtccagtgcacagtgggcacccagtggaaggcaatgagtggacttccactcacagcagggcctgagtggggctctgatcagggcctgggctttcagcttcctctctcacgcatttaccaaggggccagggactgacaagggtgtgacctgcttagatacttccctgtgcagcaacaagaccacaaaatcagggtctatgtgggtcactgggaaagggatcacaggatagagggaaatgctgcagtcgtgggtaatggagctcctatccttctctgtgaggtcagtggaagggaagtcaggaaatttgccccttctgggtgctgggcgctccctgaggcattcatccggtgtcgttggcagtcctctgacccccctaagagtgctgagaaggttaaataaacactagacttaagcacttggcccagcttccagtgcagcgtcacctgtgaacaatgttcttgataataacgttaatgataatcttccaacaaccctctgaaatccgtcctgttgtgcctattgtggcagaaaactggaagcccagaaagttcagtgttgattatgacagatctgggcaggatatcattgcatgtggggaggaagcaacagaatcattgtctgaatgtcagagaaattagagccattttacaaatggtgctggaattcaatcaaatgagtctggaaacaaaccagtctccctttcccaggtgcccacaaacctgggaacttacagagggcttccaagcagatggcagagcccatgctgtgccacccagggccactgaattgccttgcagaggctgagcagctctgcccagctccatatccacatcaggcagtgataaggcagcaaacagccagtcatttttggcatcatcttcctgggttctgggcagataaaggagatcccatcacttctctgtctccaaggtagcaacttccagcctcgaggcaaatgaaccccgagtacacacaacctggagcacctgcccttctgggaagtgcccttggtgacatttctcattccaagccaggcaccttagcaaggctgacattgtagaaggcccggagcctcttggaatgccagcttctgttggggtttgaggagaggacaagaggagggtaggatggcttaagtcttcttctgctttccttcacctctactttcagaacctactatgtgtcaggcacatagtagcaatctactagatatccattgcaatgtaatgaatcactacacacttggtggcctccagcaatatacatttattatttctcagtttaggtccaggagtccaggaatgcttaaatgggtcctctgctccgagtctcacaaggctgcaatccttgtgacattggctaggctgtgttctcatctggaggctctactggggaacaacccactgctatgctccctcaggttgtggtcagaattcatttccttgtggctatctgagcaggtccctggcattttgttgactgtcacccagaggccaccctcagattctagaagcttcccatggttctttgccctcagggcttcctcaacatggccgcggacttcatggcaccagcaaggagaatcttgctagggtatacaagcaagagggagtcatagatgatagaaaggtaaatagatagacagacagacatattaatagatatagatacagatagatctagatatatttacatgtagagatagatgatagatataaatagataatgataaattgatagacacatacatatctagatagataaatatagatagattatagaatgaataaatacatacatatatttatctaaatagatagagatggctggatggatagatggatgaatggatggatagatgattgatagacagatagatggtcctagccacactcaaagctaggagattctacagggtgtaacaccaggggacagagatcaaaagaattctgcctatggccagtaacttgagagttaagtagtatcatttctattttctagaagggaaactgaggtttagagagataactcacccaagttccaacagtggccattggccaagctggagttcagaccacgccctcctgcctctcaatgggtactgctttgttgtcattgtgacaacccttccttcagtgccccgagtaatgctaattacctgcacactgatgtggactgttgaggcaaaacatccagtactttctctaggaaacactccttgtgctcatcatgtactgtgcagcatatatcttggcgaccccctgccaaatatgagctccaagaaggcaagggctgcatccatcttgttcatggccatatctaagaccccagacaggttcctggcccatagtgtgccctctgtaaatagtcattcagtcattcaacaaatgcctgttgagctggactacatactgcagataccaagataatcaagacatagctctgtcttcccgctcccctccctatctagcatagcagaaacataaaataaaccacaagatagcgtgatatggcacaaacattactatggccaccttctcagggttattcattcttatgtccccagagcctaaaacaatagttggcacatagtaggtgctcaataatgtttgcagatcatttgtatgccttgctgtcttctctctgcatatggtagaaaatttagaagtcacgtgaggttaattggtcaagagaaaattaaaagtacatataacagcctcccagtctagcttccgaagtctctgacccatcctacaatcctggcacctccctttttgagcagagctttgcatttctaaataggaaaaaaaaaaaaagtctgtaattattaaaactgtgtatataggagaatttagcctttcatttgaggtatcctaatgacacttcaacaactactagggaagataatagggtttagagcaattacacagcctgtcaaataccaaagatgagtgattcagattcatgctcagagctggaacaattctcagcggttttgctcatacacagctgtttcatttaaaatattttggcagaaaattgcaaagtgggccatgctggccatccctgctttggaaacttaactcctggcatacctaacatcatccttctcttcccctcttattcccccgccccacagcctcaccttaattgctgctgggcaaactgtttgagcgacatgtttgcaagtcaaaacttgaccctagagctgaaaatgctgggtactttgttgccccttcgtccactggaagattttctgtcttgttctatcattcaccactaggtaaccagtcccatgtgtattgcgagtgtatatccatcaaggtcctggctgaaaacagatggcccactaaaactgggtgatctgagaagagttcaatgggagacctgttgacaagtgttcagtgtgaatttaaggaaatccagtgtaatagcgcgttacccaggtgggtgccacagcagggaggcgataccacctctacttcttcagggacaagggtcacgaagcagtcaacagaatttggagagcatgcctgcatggatgtggggacagcccagcaggagctgcagctttgagtttgaggcatgaggccaaccccagcaacagcacgggtttttggaaatgcaaaggcaggctgcaccctctagactcctcctggtgtctcccattggccaaacccaaatggaggccaaaactcattgcagggaaggagcagacctcggatgcattccttgcaggtcagcctcccagaactttgagaaggggtgagggaggatgttgagagtcgaactgaagaggccaggcatggtggctcacacttgtaaccccagcactttgggaggccgaggcaggtggatcacttgaggtcagcagttcaagaccagcctagccaacatggtgaaagaccgtctctactaacaatacaaaaattagccaggcatagtggcaggcacctgtaatcccagctgcctgggaggctgaggcaggacaatcgcttgaatctgggaggcaaacgccgcagtgagccgagatcgtgccattgcactccagcctgggcaacaacagcgaaactctgtctcaaaaaaaaattgaagatactcagtaccaagaaggtccaagaaagtcgacatgttttctgccctcaagaaatgaacctctggcttaaaacaaaaaccttgcaagcaactaatgatgggctaacttggtaccggtatagaaggactcgttcaatttaccttaaatcattaagagtcccttgtcagggggcctgacaggatcccagaaaaagccaaatcctcgagcttcaagaagagctggagctaactctctatgatagttaatttacgtgtcagcttggctgggctgtggggcccagttgttccatcaaacacgagttcagatgttgctgggaaggtattttgttgatggaattaatgtcccaaatcatctggctttaagtcaaggtgaggaccgttgttcttatgggtgggcctcctccaaccagtgggcagccttacgaataaaaactggttttcccaaaaaacgaagaaatcctgcctcaagactgtaacgtggaaatcctacctgagtttccagtctgccaaagtgccctacagatttcacagccgagactgcggctccaaatcctgcctgcatttccagcctgccctacacacttcagacttgcgagtccccaccatcatgtgagccaattcctttgaaaaaaaatctttttttttttttttttttgagaaggagtctcactctgtcacccaggctggagtgcagtggtacggtatcggctcattgcaacctccgtctcctgggttcaagcaattctcctccctcaacctcccgagtagctgggattacaggtgcccaccaccacacctggctaatttttaaatatttttagtagagacagggtttcaccatgttggccaggctggtcttgaactcctgacttcagttgatccacccgtctcagcctcccaaagtgctacgatgtaggcataagccactgtgcctggcccgaaaaaaaatctatttatatatatatagtccaccctcacctctatctaatctagtggttctccaactttaatgtgctcaggaatcacctggagaatttgtgaatttatgaaaacagtttcctggggcccttcccaaatatgcagattcagtaggagtggcagggcccatgaactcacattctgtgacgttcacacagaggggctggtgctgctggtcaaagatcaccattagagcaatgctggatcatctattcagcctactctccctaactgtttccccgcagaggcttcagggcttttgagggttacttagccaagtcattgcctctgttcccggagccatctgccaatttcaagtgccacatcatctgggtatcatgagagcccatctccatctgccagcctggaagcagccatggcaaatgggatgtgtcccactgcccccgtttggtgccacagttgggtttattctcacagctgcaaacccacgtgctgggctgcacagctgcctgaacgaagctggagcgtgcagaacaaactgcatggaatgtcacgtggggttttccactctcgcccacagtgagttggcaatgcctggccacgtgtgctctgtggtctttgaacttgatctgggaggacagaacttcaaaaggaagatgaaggccccagcaagggaggtattcctgtcttgagcagaaggtaaaggtagaaggtgcagattaggtactgggaatagtcatggtttggtttgaatggagtagaagattccagaggaagagcagtggggcacagtggggagtgaagggggccatggcagtctgatgcagggaagggatacgcccaagatggccaggagagaagagccgaggggcagggtgagcaaaaggtgaataagggctcagacgacatgacggcaccggggatggcaagggctggacgcagcaggaccgtggtctgttctgtgatggattgtcgggagaaacgggagcgtgtgaggaattgaaaaggaggcaacattctgattctgagtctggatgcctgaaaaatagaagtcccagagatcaaaatagtagaggctggaagaaaaatggatggggaagaagtgagcttgaaagaatccttagaagtcactgttatgggcttagttgtatcctcttaaaattcatataatgaagccctaaccctcccagacctcagaatgtgactgaatatggaggaagtgtctttcaagaggtaattaccgcctgtaatcccagtactttgggaagcaaaggcaggcagatcacttgaggtcaggagtttgagaccagcctagccaacatggtgaaaccctgtctctactaaaaatacaaaacaaattagccaggtgttgtggcaggcacctgtaatcccagctacttgggaggctgaggcaggagaatcgcttgaacccaggaggtggaggttgcagtgagtggagatagctccactgcactccagccagggtgactgagactccacctctgaaaaaaaaaaaaaagaggtaattacagtaaaatgaggtaactagggtgggccctaacccaatacaactggtgtccttgtaagaggaggggattcggacacagatacacccagagggacaaccagagggggtctcagggagaagacagccgtctacaagccacggagagaggcctcaggagaaacgacccctgctaacacctagatctcagacttccagcctccagaattgtgagaaagtaaatttctattgtttaagccccccagtcaaccctggaaagctggtactactgtcaccagctgaatctccctgtgtaacagatggaaatattgaggcccatggagggaagcaactccctccaaggagcagagtcccgtctgccctcagtagagctctcagctccagacacgtggtggttttcttaccagaccacactgcctcttgcatcgtgaaatactgaccgtctccctgtctgtagatttggttgttcaaacaacatgctgctactaaagaaagcctctgtttgtttgtttgtttttttggattaatgatttttctcctggagtttcctggttccccacctccacaacagcgacccttcttgcctctttccattcctggtcttgatggccaagcccaggaaaacaaagctttcgtcccagccaggtaacttgagggggcacgtcacctgtgaccctgggaggtgaggtgccaggccgagaattccaggaggcacctgggagaacagggcagggaaagaggctggactagagatactgattcaggtcatgtgtgcatggaagcactgcgaggatatgaaatcagggagacaaaagcaggagggagaaaacatccttgtcttcaccaagattctttgggtctttgggtttcaagcaatagaatctgcctcagggttgcttacatggtgaaggaggatttcttgggaagacactggaatttcacacaatgcaaagagaagctgggcgttcaggtctggggagggaattggaggctggggagccgcccctctctcagcccctccctcctgggctgcgtgtccttccgtccctgtgcagtagttcaaatgtctgtgcacaaaacagaaaactctgactcaccttgcccacacaatgagaaaagtatgttttcccacatcacagcgggtcctgacgtaggatgccccagtggccttctctggaggctccgtcgtgttccggcatctggtctatcccgtctttccttcccactcacctccatcgctggctctgtggcgagtgctcctttcctggcatcacggtggcccacacatgaagacagggctgcatctaatcctagagagggctgcttttcccaggcgtctctttcttaggagccctccagaagctcctctagccctggcccgtgccgctttggccacagctgagtcaggtgccgagtggatcactggcgaggtaaaggggatcgccaccatcctatggggaaggggggcttcccaaagaaaatggaggttctcttcgaaagcaggaaggggtgcctgggagtgtttgctggggagacaactcggcttccccctgcaaccagccccgttctcctccctctgtagagcagccttctgggcatgtggcaccacacctgggaaggcccgtcgcctcggccacacatgggcaggctctgaatccggattcctaattcctaggagagagaatccacaacgaacagcttcagtcaggagaaaactgggcatgaaccgagacgtccccgtgaagtcatgcaggacaaacacgcggcttaggggcatctctgggagggaagggggccgtttccagaggaaggaagttgttgggaagcccaggagataccccagtgtggtatctcctgcacagccttggagaatatggagattgaagagagtagatacagaggttggcaaccaaggctggtatccccacccccactcccaagtaggaggtatttggaaatttggggggtcgctttggttgtcaccagcctgggggcagctattggtattcagaaggtagtggccaggatgttgaatgtcctgaaacgcaggggacagtcctatacaatgaagaattatcccaccaaaatgccagctgtgccacatagggagacaaaaagaaagaagggatacttaagaaagcttgggagtgggagggacagatcgtatagtgtgtggaagcccagaaggggaggtccgctcagattggaggctgggagcagggcctagttcttggtgctccaggaaacctaggaagacaagacctaagcatgggcaaaatgaggccagggaatgagtgggcccggcgtggtggcttgcgcctgtgatcccagcactttaggaggccaaggcagacggatcacctgaggtcaggagttcaagaccagcctggccaacatggtgaaaccccgtctctactaaaaacacaaaaattagccgggcatgctggcgcatgcctgtaatcccagctactcaggaggctgaggcaggaaaatctcttgaacccaggaggcggaggttgcagtgagccgagattgcaccattgcactccaccctgggcaacagagcaagactccatctcaaaaaaaaaaaaaaaaaaggttaaaaatcccagggaggaagtggaagcagactttcagactcaattcaggcaggggtgcagcgtgatgggaggcctggttagatcctgatgctgctcttcctaggaagatgagaagagcccagggacagcacgaaagaaagagagctagaaagggataggcagaggaagagtgaaccagcagggcaggagacccttgggttagaacttccatgaacttgctctgcagacactgtcaataaaagtgcattgactactgctcctgggaggtatatttaagaaatgataaccaattatgatgtgttagcctgaagttaaaggaatggagaattcagtagacctacccggcacccaacagctgttgtgtgggcagcactgcaaagcagggaggaaatgacacaggtttcagagtccaaggagcgacgcttgcatcttgactgtccttgctgctcagagatttatctgagggttaagtaaaaaaagatatctaatgcagtccccagaacatgggcgccattccagaaatggtggcagaatgctatttatgttactgtgatcatcatcgtcatcatcatcatcatcttcatgacagtcacccccttgagcctcagtgttgcctcctctcctatgggggtagtattctacggtatttgcagccttcttctatctggttctctgtgttgacttcctgacacttggtggcagagaattccttggcttggctctatgaaccatgagatattttggtttgaagtgtcccttctaggctctacatttagtggcctcttgggggaagactcttctgcagaggcactgaggtaggtgctgaccatttggctgtttgcacggccccctctctgctgtgagccccaaatgctgttccacagcgaggtgtgctcacagcgcatcccccttgctgaagccgggggttcacccacagccttctctgacttttcccactgccccaggcctaaacagggaatttcagagtctcgcaaaagctagcaaggactgccttttaagtcatgtccattcaaaggcctggaccatccctgaggccgcgaaggcacagagagaacagaacagcttttgggatgtgttttatgatgctcagagatcctatgactcctttcttgactccacttctgtggctccacctggaagctgtctctccaggccagcttttctcatctgtcctagaaaatgccatctccatcaccgcttctttttgctgttttatctttctcgctctttttcagtcatcccacactctctctagactttatttaaacaagtatgcattcctgcttgccgcgggcctgaaaaaaccataacgatgttgtatgtaaaagagctgtctgtgcctccaggcatgagggcttttcgtgtataattcacatcatcctcacaaaactccaatgagccagctacttttatcatcatccccattttccaggcaagcaaactgaggcacaaagagactaagtcacttgcccaaggacacatatctagtaagggaccacgttgggattggaacccaggccttccacctctaaagcctgtgcacttaatccccaagctgcattcatcccattgtcgcctgatcaagccccacctgtgtgttcttcataccttaccttgcgtgtcattgactccccaggactggactttctgtccatgtgtccactgcaaggcctctgagaccacagccctcactcttatttgttgttagtggtttaattctgtctctctggtccacacgctccaggagggcacattgatatctccagcacttaacccaaggccagcacgtagcaggtgctcagtgaacacgctctgaattggtggacagctggctgaatggtaacaagacacagagattcaattgctcctcaaagtccacatagcaaagaaggggctggacctggactcagacccaagttttagaaaagcaggtccatgctggccgctgagtcccctgcccatcgagagccacatggaaatgttttgctggtggaagcccgtgcacccccatctgagggacagaggcacagagagactccttttgttgttcctcccagattgcaaaagcaggaataaagggaaagaagggaaaatttcccagcatgtgaccaggagggtgtgctaattgtctgcggatgttcgtaaaaggcaagaatctgtctcattgtcaggcgctctggcgttggccatatggatttattttagtggatttttgtgttgtagagtttctgataaacacaggatgagtcattgcctgcttctgcaattgcactcaagcctgagccaccctcctcaacactctgagacctcctgagagccaggttgcaatttctggaaaattctacagagcggccttgctgctcctgggggcggctgatggcccgttccccatgggtgtcgcctccctcctctgtgccttctcagcctcggtcccgcgctggccgtttccctcccatgtcagtggttctgtcggtttcacatgcatgcccccactgagactgttaagttcctctccagtagcggctggattttttttcatctcggtttttacagaacctggtatccccacatgcccaacatgcacctgctgaaggatgaacctggaatttcctgtttcccattggtaagcctggctgggaatctgggcttaaaagaattcaggccgcctttgctcttctcacccactcagattttcatggacaacaagttggtgcagcgaaaagaatgaagacttggggtcagaccaaatggggttcagatcctggctcggcggctgtgtgatgtggggttagccaagctctccgagtcccagtgtctgtgtttgtgctcttggaatcaatccccacctattggagctgccgtgagggcggaatcagatgatgtgcgggaggctgcgcacatcaggcagttctgtggatgttggatgcctttcctctttcccctcacctgggaaaagagagggatgggcccagtcctgaggcatccattggctaaggtaactttctgtcatgcagggacccaacccagtagtgattgacttgaaaaaactcaaggctgactctgagcattctgggggcagggattttgtttttttgtgttttggttttttaaactttccgtaagtgtttggggtacaggtggcatttggttgcatgagtacgttctttagtggtgatttgtgagattttggtgcacccatcacccgagcagtgtacactgaacccaacgtgtagccttttatccctcacctgcttcccaccctttgccctgagtccccaaagtccatcatatcattcttaggcctttgcgtcctcgtagcttagcctccacttatgagtgagaacatgcgacgtttgcttttccattaggggcagggattttatttgcctccccctgcacactaggctgacagacagtaaaattgcttagggctgagctgggttcaagaggagggttgttgggaaagagggagtgggtcccagagaggagccctcgaagcaggccccagaggctggtaagcagccgccactggccctttggagaatgttcacaagggcctttctgccagcaagcttcaattttttaataaagcagctgtcttaccttcaaagtttgggaaccagtaatgagtgggcatgtctatgggattgagaaactctccactcaaggatcccctggctaaggtggaacaggagcccctaacttggggtttcacatgttgtcataggaaaccctagaaatagactggggtttcttttattccttctccatttgcataaaagttggctgtggcccttcctgtcatcttgggaagacgactaaagttaaataacattgctggaaacagaggtccaatgcttaagccagagatgacaaatactagcacacagggcataactcagccctcccctgcctgtggcagacatacacaatcaatcaccgaattctctatgccatcccttggcatacacaatcaatcgacaaatgctctatgccatccctggcaacatagtcacagttcagggaactttctgaattgtgatcattgtgatcatttatattaataaacatcttctcttttaaaaaggagaaaacaacataaaatatctcggctaaaacatgtatcactgcactgtgtaaatattcaggactctggagattgcatctcaattgttttattttcgtcctattttatttgagtataaacaataaatatgttgcaaattattaatggaaaaccgtgtttaaaaattacagctattatcgatcaattggatgaaataatcgctacaatcactggataattagatccttcctggcctaagaggagggtgcatgagctctgggattgattctctgctcaacggagtcccagaaccaagaggagagattcctgaaccctggggcagccacgttggcaattttaagttgcggtagcagtccatagtccccccaagaaaggaagaaactacatccattataaatgcttttagctgaaggttacagaaaccttgactaaaagttgcttaaactatgtttttttcccccactaaataaaaaaatgctgtggttggtagcactggacgggtacaacagtccaaaagcatcatcaggaacccagtctctttccatctttccaagttggcatccagaggttggtggtttgttacttcatggtcacaagatggctgcagatgctccaagctccacattcccatttcaggcaggaagaaggcagaagagatagcgagagcaacatttgtactgctttaatcaggagatctcccgagagacttctacttaagtctcactggccagaacagggtcacatggccacccttgctacaagagaggctgagaaagcgaggaacaggatatcctgggtggcttaagccattagttcatgatccttcacctggggctgagtatactgttactctgaacaagcaggggctctgttagcaggaaaggagagcctggaaattgagtagacagctaatagtgtcgtgactgactcacgagaagaccatgccccaagtccctttgagccatgataggcatgaataacagagctatggatgactttatggttccttgttcattgattccctcaacacatatttaatcagtatctagtggatatgagaaattgtgctaggataagaaaagaagtgcagaattatttaggaacatgtaacagagatggaggacaacacaggaactttctcgggaaagtgacagctaagccaagagaagaaatgagtaacagctggttgtgatggcacatgcctataatcccagctactcgggaggctgaggcaggaggatctcttgagctcaggggttcaaggctgcagtgagctatgattgtgccgctgtactccagcctgggtgacagagcaagactctgtctctgaaaaaaagaaaagagtaacagtttgccagcttgtcccttgtcctgtgtgcatgtgtttattggggtagggaggtggatttgtgagaggggcagactggaggagagacgactgttacaggcagacagaatgatgtgtgtgaaggtcttgattgtcaaagaagcgtgacaaattttcagagatcagaggaggctagtgtggccagagcatagaaggtaagcctggaaagacaggcagacactggatagtgaaggaccatatgagccaacctgagtttagacttcgtccaaaggtcatgtctgccccagccctgttcaggggcagtcccaggccctaggctttgctagtgggaagcaggtaaaagcagcactagccactagcccccactagcaagtggtcaacacatgagccttctttgtggctatagtaatcagttctttcttctttgtggctatagtaatcacagttaagggtggggaaaatggtttaataataacaggtgttgggggagtagttatagctacatattattaaaaaggccaaaggtagctggcttcaggcacagctggatccaggggctcaagtcgtgtcatcatgaatctgtctctctttttctagactctttcttcctttgtgttggcttcactcacagacaggctttccctgagccgtagcaggtggccatgagaagctccagacttatgttctataaaccttgggccagagggaaaaatgacagtcccagcaaaggtcctaggagaactctccttggcccaacttgggtgacgtgttcatccctgaatgtatcacagagaacaagggatgctgtgctttaattgtcaggcctgagtcaggtgcccagccctcaggagcctgcagagtgagccaagagagaaggggcgtattagtccattctcacactgttgtaaagaactacctgagactgggcaatgtatggagaaaggaggtttaattgacccacagttctgcaggctgtacaagaggcacggctgggaggcctcaggaaacttacaatcatgaggaaggcgaatgggaagccagtcttcccatggcagagcaggagagagagaaagagagtgaagggggagtgctacacacttttaaacaaccagatttcatgagaactctatctcaagacagcaccagggggatggtgccaaaccattagaaaccaccaccatgatctaatcaccttccaccaggaccctcccacaacactggggattacagttcaacatgagagttgggtggggacatagccaaaccatatcaagggagaaatgtggatgctgtcatgttcaggtggactgagcaccaggcagtccctgcagcctcattcttacctcacccatcaatgtcaggatgtgcctgttcccccagctccagcccttctctacctcttcatgctgtgcatcccatctgatgacccaggcgctctctcccacttttagtagagacagggtttcaccatgttggccaggctggtctcgaactcctgacctcaggtgagccacctgccttggcctcccaaagtgctgggattacaggcgtgagccaccacgcctgcccaattctcttgtttttgctcatgcccattcccttgtttttgcttatgcccatttggcttcaggtacagctggatccagaggctcatccctgatggatcacagagaaaaccctcggttgtcctccacccaggatggaactgcttctaactgttctggagaattcctggcaatcccagttcctctgctgctgctgctgctgctgcttctgctgctcccaagaaagtgggacgcctcccttcctgtactcttcccttccctgacctggcagagcccagccaacagcattggtcagttctgcctttgataaagaaaaatgtcgaagtttccctctgtcacataaaatgaagatgtgggtgctgtgtgttgctttccgttcagcagtttctcagcggcctggccagcacaccaccatgaaggcattgatttattccatctaatacacagcactgcttattagtgctctcaatctgacaagaaatattgagcctaccgccgaggttttacaaaaatatgaatacatccctatctggactctgagctaagagagcattttgcccactgaatgggaaaccgagacagggaaatgacaagcgactgtgctgaggctcgggtgggccctgcttgtccttcattgcctcctccagcttatcttgcctggacgcctcctctgaaatcctcactgtattattcaggactctgggttgcgagtgacagaaacccaactcaaatgagcatgagcaaaaacaagggaattggctgggcttagtggctcacacctgtactcgcagcactttgggaggccgagggaggtgaatcacctgagatcaggagttcgagaccagcctggccaacgtggtgaaaccccatctctataaaagtacaaaaaaattagccaggcatggtggcaggcacctgtaatcccagctacttgagaggctgaggcaggagaatcacttgaacccaggaggcagaggttgcagtgagcagagatcgcaccattgcgctccagcctgggcaacaagagcgaaactccatctcaaaaaaaaaaaaaaagacacacacactcacaagagaatttactaagctacaggcatggctgaatctgccacaccccacaccccccacgtctctctatctctgggatctgctgtgctgtggtggaggggacttcattcttaagcagggcctctcccatcttagcccctggaatttgcaaaacacatccttactgctcagcagcttcgacagagagaggatgactctttcccagacttttcagtagacatcctgggagtaatgttcactatctttgattggatcagttttgatcttggatctagggtctaggctaagggtgtccaaaatcttttggcttccctgggccacactggaagaagaattgtcttgggccacacataagatacactaacactgacgatagctgatgagctaaaaagagaaagaaagaaaatcacaatgccctaaaaaagtttacaaattcgtatcgggctgcattcaaagccatcctgggctaatgcacagcccacgtgccctgggttggacaagtatggtctagaccaatcccgccacttgattctgcctggcccacaacctaagaatgctattcacacatttaaatggttgaaaaaaaacaaaggaagagcaatatatcatgacctgtgaaagttacatgaaattcacgtttcagtgtccataaagacttattggaacccaagcgtgctcattcctttagggcttgtcgaaggccgcttttgtgctacagtggcagagttgaatagtcaaggtggactatatggcttgcacagctgaaaagatatttattcatctaaaattttattttaaaaattgataatgaataatttacttaatcataaataaaagataaaattaatattctatttactcatctttatagaagaagcttgccaacccctggtctagactgtgtagccagtgagatgcctcagtcgagtgcccatccttggagtgggttgaggcagagggagtgaaccactcaccgagttggaccatggcgtgacagtggcagtgggtttctagcagacagcaggtatccatgctggacagaaagaacaatgagtgtccatgcccccccactgtcttgggctgggatctcctagaaacagaccctgaaacaaatgtgtgagtacttgacctttatgcaggagggcatccctgggagcactggtgtgtgtgtgggcagcagaatgggagtgagacagggaaggaaaggggaggggaaggaaagaagtcaatatagggtacattgttgagcagtcaccacaagggttcaatcctgctgggtgtctcagtgtggagcacacccctcagatatcccgccaaggggcagggaaagtagggtatccgtcctctaccccccccaggccctcatcataagcatatgggttctgtcttttctgggtgattgtgaggcagcccctttttccatctcctgtgcagtgaggatttcatgaagtcttgttgatgtacaggtgcccgggggaaagcatgagtggtgaccaggagcctgaagatgagagctctcttgttcctcgtcccggaacccttgctaatagaccctggagccaggtgttgccgctccaaggctctgatgacatccatgcttcaccagcaggtggtggccgcctcgttcagttcatacaacctgaaattcgggtttgccagaatgttggtgtctaagagccgagaatgtcatcaaccacagttcttttgttaccacacaaaaggactctgctgtcctcccaagtcattcacacacacacacacacacacacacacacacacacacacatacacacacatacatacatatatattttttgttgttgttgttttgagatggagtctcactctgtcacccaggctggagtgtagtggtgtgatctcagctcaccgcaacctctgcctcctgggttcaagcaattctgctacctcagcctcctgagtagctagggttgcagtcatctgccaccacgcctggctaatttttgtatttttagtagagatggggtttcaccatgttggccaggctggtcttgaactcctgacctcaggcgatccacctacctcggcctcccaaagttctgggattacaggtgtgagccactatgcctggccccaagtcaccaagtcacttcctttttttttttttttttttttttgagatagagtctcgctctgtcacccaggctggagtgcagtggcatgatctcggctcactgcaagctccgcctctggggttcacaccattctcctgcctcagcctcccaagtagctgggactacaggtgcccaccaccacgcccagctgattttctgtatatttagtagagacggggtttcaccgtgttagccaggatggtctcgatctcctgaccttgtgatccacctgcctcagcctcccaaagtgctgggattacaggcgtgagccactgcgcccagctgaaacaacatcattttaaaattagcattatgtgctcgacaaatttgtatcgagtaacttgcaccaggcactggaaatataagagtggaaagaaaaaagaaaaacagtcaaaaattcctaccctgatggagcttggagcctaggggaattattagtattagtattagtattagtattatataatgatgaaatagtggctattgttataacactgagtctggattcagtagatttaaagtgctggtttggggcactctcccattttaaatgacttttctgctgcagaagacttctttagctagaccacccgctaaaaaaagagtaggttccctaatggttttatgtgtttctgtgttcagttaaagcaggcttattttggcaagcaggctttgaaacagtttgtcataagcagattgagtgcatggcattaattcattagaaatgcccatcccgccagcgggatcagagtttcttgatccctccccgagaggtattgtaattcctatcaactgtgatcatagaattttctacctgtctttgtatctgctttgccctgtggtcaccaaagacatatgttgccttaaagggcagtgaggaaggatgatggcatctgtgacaagctctaaattgaagaaaaattaaaattggctgtaaagtttcagggttaccgcagagcaaattcaaaaagagggacagaatgagagatgggctacagctccagagagtgtttcttgtaccccgtaggcagagccagagaaaacctgacgagaagggggtgggggccgcaatctgagtgtctctcctggagcctgattggaacacgggatcaaccatgaggtgcattatgttactcactctgcacaacagccccagtaaagttatggatagtctcattgtcacgggaggaaactgaagcgcggaagttaaataactggccccaaattgcaccgtaatagaagaggcagagctgggatttgaacccagacctctatgttaatagtgcgttccaagagccacttgtcactggaagggaaatgggagctgtgcttccagggccccttttgtccctgtaacaccatctcctgcctccaccacccgtagcccttggcctggactctttccctggctcctatccgggaaacacctcccacccccgccccctgacagctcccaggagtccccttcctccttgacattgaggtttgaggggcaccaatgtgtaacactccaattttccctgctgactcataacccagtgagactgaaaacaaaagtcagcagatgcaggccaaaatgttacctctattgctggtaacagctgggttggagatagaagaatggggatctcattaggcaaacagacccttgtgggccagttggatgacagcaggcccctgagcccctccgccccgctagcaggagacctgacctgtaagttttacagaaagtgtgcttcctgcaggcaactggctcctgagagaagaggggacagaagctgaagcctgcatgcccacctcccctctggtgctcgctaaagactccaggtcccctgggcaggacagagagagggtggagagaagccaggagggacataagccagaggacaggaagtttctggtccaggtccccaggtcccaagccccagattttaagcctgaactcaaagccgcacctctgtgtctcttacctgacagactggggagtgggtgggacgagctccagcctcctccctcactgccccaagcagctgcccctttggcttctgagggttttgttgcgagtggcaagtgggagccaccagatgttccaccgctaaagagtgacagaggttccaggttctgaccctccaactcctcatcccaactctgaagcttcattcaacttgacggaagctcatctgggcccacgcctcctctttccagacccactttggtctcttcctctcttgagcatccccgaggcctgagaagtcaggtcaggtgaaacctcaggctccccaactcccacctcctgctccccagccacctccacccaagccaagtcctgcacgatgtggggagggaaatggagagggggtgtctcagcatggattcccccacgccttgcctctctttaaaatttttcattatattctatttaatatattttaaagacctccatcaatgaatttgaaagttttaaaatataatacttttaaatggcactcttagacccatcatctccccaaagtacttgaaactaatgagccctgctgaggccacctgcaggtgcttcccgtccactcctccgcccccaggtaaccgccttcctgaattctgtctttctaaaagctgctttgatctaattacacagcagttctgtcctgaatgttgtctttctcatttctttgcttgtttttttaaagttttgctgtgtgtttataaatctctagataattatttaattttttaaaaaatttttagaaagatctcataggtaggctcttgcttcttgctttcttcatttatcattatggtgctaaaatacatccctgctgttgttgttgctgctgtttttgagactgagtttcgctgttgttgcccaggctggagtgcaatagtgcggtcttggctcaccgcaacctccgcttcccaggttcaagtgattctcctgcctcagcctccccgagtagctgggattacaggcaggcgccaccatgccctgctaattttgtattttgagtagagacggggtttctccatgtgggtcaggctggtctcgaactcccgacctcaggtgatctgcctgcctcaacctcccaaagtgctgggattttaggcgtgagccactgtgcctggcccatacctgttgttttatgtcagtgtagttcattcattcccatagctgtataattttttttttttttttttttgagacagggtcttgctctgtcacccaggctggagtgcaatagcgcaatcatagctcactgcagcctcaacctcctaggctcaagagatcctcccacctcagcctcctgagtagctggcagataggcatgtgccaccacccctggataattattattattattattattatttttagagacaagcctgttgccctggctggtcttgaactcctggattcgagcaatccctctacctcagcctctcaaagtgctgggattacaggcgtgagccatggcacctggctcatattcttttgtgtgaatataaaacggtttatttaaccattctacctctgatggaccatggagctatatttggggtggtggagggtaatcataaacaatgctgctgtcttagtccctttgtgctaaatggactgagactggatgatttataaagaagaacaggaacttatttctgacagttctggaggctgggaagtccaagatcaaggcactggaaggttctgttgtctggtgagagctgctgccttcttccaagatggcgccttggggctgtaccctccggaggggaccaatgctgcaccctcacgtggaggaagggatggaagggcaaaagagctgtggctgtgtgaagtctcttttctaaagaccttaatcccattcacaagggaggagccctcatgacctaatcacttcctgaaggccctaccgctgtatactatcacattgataagtttcaacatatgaaatttaagatcatagcagcacgtctgaatgtacttatccatgacttctggaattgctcttggatttatggctaggagtgaaattgctggattgtggggcatgagatgaactggaaagtccaaacctcagctgggaagaaagagccccccacctggtcagttacccagaatcttccctcttgctaactttatctccttctgttcagcttcacaaaaccatgctcaattaggttccaaggtgtgcctcggctcccctcttgatcccattctttggttgtaaggttagcttcctggttctttttgtttgtgaggggaaggggagacagagtctcattctgtcacccagcctggagtgcattggtgggatctcagctcactgcaaacctctgcctcccaggttcaagtgattctcatgtctcagcctcctgagtacctggaattacaggcgcttgccaccacacctggctaatttttgtatttgtagtagagacaaggtttcactctattggcccggctgatcttgaactcctgacctcaaatgatccgcccactttggcctccccagatgctggaattgcaggtgtgagccaccgcacctggccctgattcttaaacctactccaggtttgcactttatccacctggctttgaagaaaagagagaagggcaagcagcccatgcccccataatcaactcctgccaggggcatcataagaattccaggctttagcacagtgcatggagggaagactttcaggctgcagaggtgcttcctaaacctgccctgcctgtcctgccacttcggagcactaacacttagtgtttccttggtattatccctcagatgcttggaagaaatgttcccatgagaaggctgtgtaggatagtgattaagactgcagtctccggagtgttctgtctgggttcaaatcctagccccattcctttgctaggtgagagactctagacaagtccccctaccttccctggcctcaatttccatgagctgggtgtgaggaagttcactgagtcactgtgaggattaagttagggtaatacaagtcaaacacctagaacagtacctggcataaacattcaataaatgctagggatcatttttaagtagcataataaatgaagcgcacccagaaaaatgtgaccaaagcaagccctaaatgaacatgagctattggtatgattgttatcgttaccagaaaaacccctattcatccttcaagatccaaccaagatatccttccctgtctctctattctgacggcatttggtgcagagctcataatctcatctatcaggttgtgttttaatctacctgtttgtgtgtttgttattgttgttgctctttcttcttcctcagctagattgtatctttaagaacggggactatttttctctgactaatcctcaccctgacgtccttgatggccagcacagcgtagatgctccattgatgaaatgaaagacattggggcttgtatgtcttagaggcacctcaaggctctggaggtgcctctaagtttgcagagcaggcaataaagggaaaccagcctggctgagtttcttcttttctctgggttgcaataattctgggggaggaagagccaaatggtctctgtcctgccttctgtcctctccagtaccttgcctgtccctctaggagctccagccagatgccaagataggtgccaacccacccccaccccgctattttttctgaccctccctaccacctggcactgcagaaaactgacttccttcacattgtgttgttctcatgggctgcttcagaccacgaatcccttttcattcttaatagagtccaggagaggtcttgcacggtgattgccgattcaagtacgctcctctgcagaggtcgattattgcttttatttaaataatagccattgaaatgattagattgctgggcgctggaaagtctggggtgggggatctaatcacacacagaataactggcaaatcatctcatttcaaccttttctccctaatcacgagctgctcctccctttttgagcatttgggtgcccctgtccacctctccagaatctatgtctgtgggaatacaggtgcaagaaaggagagacatttcgcaagcacattaaatatctctcaaacatgaacccaagggtgaaggctctcctgatgctcagagaagattatgctgcacactgcctgctgaaatcactctagccttcgtggcaggtgatagaggcgctttgggcgtgatcttctgaactgtgctaagtaagggctgccatttggcgataagctgccctcagaagtccaacactcatccaggcagaaagagcgtggtcatttagcctggatgctgcctcttgcaaactcatctcttgtccacgatgcacctcaatagtccttggtggagacccttcaaatctatgcagggggtcatatatgtaagtgttcatactgtaaacagaagggtaatttattcatatctattgaatgcatgcctaccatgtgccagatactattaggaatgtgaagtgaatatagcaatgccaggatgccagataccaaaggccataatcactttcatatagatagttgatgatgaagaaagagagagagataagtggaaagatgataggtagatagggaaataatttaattctgatagtgtaagcatgcacacatctggggaagaacattctaagcatcaacaacaagtgtaaaggcttcaggtgcaatacatttggcacatttgtggcaccatatgtacttttgcaggcaattctgttagaaatggagccataagcggccgggtgtggtggctcacgcttgtaatcccagcactttgggaggccaaggcgggtggatcatgaggtcaggagatcgagaacacgttgaaaccccgtctctactaaaaatgcaaaaagttagccaggcgtggtggtgggtgcctatggtcccagctactcggagaggctgaggcaggagaatggtgtgaacccgggaggcggagcttgcagtgagccgagatcgccccactgcactccagcctgggcgacagagcaagactccgtctcaaaaaaaaaaaaaaaaaaaaaaaaaaaaaaaaaaaagaaatggagccataagcatgctgtgtgccaagtagggagaggacactccctggccaaagatttacatttcctgggtataggggcagggacttttttaaatccctggagcattaaagagcagatggccatgcactggcagtagggtactggatgctagggctagatacacccctcccttcccagctctgcacccagtgacgtcacattggcttaacatcagcagcagtgggaggatcacaacacagaaaccagcagatgctgcaaagcaggactttgtattttcctttcttctctttttttccttgagagccatttttttgtaccactgacatcaaggcctccctgggaatgaatgaatgcaccaggcaatggatcggacctgcctgattatctatctcatttcatcttttctactcatctctgttcatcctgttctagccactccagcatcctgactgatactcatccaggctagctgtgctcctgccttcaggcttttgtgctggctgttccttttccccacacacattgcaggcctaactctctaacctccttcagggctttgctgggatgtgcccttatcagtgagtccttccctaactgcagcttccaaccacagcacttcttgtccccctccctgctctctttctcacttatgctatcttttgctgatttgtctttgttattctctacctcagcccaacccccactagaatgtaaccatccaagagaaaatggggattttcatgttttgttcactcttttatacccagcactttaaaccatgcctggcacataataggtggtcattcattttttgttgaatgcatgaatgaatggcctggtctgttttctcttttccctctggtggatccatatctgtggtagtgtctcttatttctagaacagtaatagacacgcaggatcaagcaggccttgctacccaggagaaaaccaaggtagcacgatgagaagactgagggtcttgcctggagccaatgtcagtccatggcactgcagggaggccctgggcaggggcattctctcctgttgcgttagctatcagccctgtgaagccctcgttgtcctacatcatcgagtgaaatattcccaccagagtgtttatatttaaaagtcattgcactgaatggaattgacatctgtttacattacattgccattactcatttccatgtacaatgtttgccttcatgctgcagtatcattttaggacatgttacaaggaaggattagaggagcagtacaatttgcaaggggattttctttttctttgtgcttgttcttattttttaatttttacttttattaaagtaatacatgcacataatttcaaaatcaaagagtagtaaaaggcttataatggaaaatgatggtcccatggccacccttctcctccttcaattccagctccctggagtcaaggacttcccacagttttaactggggtttttgttgctccttgtctccataatgtgatgtgattggtatattgctgtttctcggcttacccaagaaacatctcttatagacattatctcttgatgttctgtgatggtggatgaaacttgagctctctttggccccctccctccccagtcttcccaatacagttgcatcacatttcctagtttcagtggctggccagtgctggtatttattaaaaccacattcactgtagagccaggaagtatactaagattatcccagagctgctgtcctattcaagtcgattcctactgtgtgcttagtcatcatactagactcaaggcagtgtgtggggtcaaagggagagagaatccagaaaagaaacaaataaaggtttgagaaaaagaataataagggacccatctggatgggtggtaggagaagacctctctgaggaggtagaggaggtaacatttaagctgaaccctaaaggatggcagggagggagtctgccatgggaagaagccaagaggagtagttttctaggcagagagaagggcacaggaggcccctaatctgagagcctaggatctcatggttgctgtgacatgaggctcattagaggagatgacctttctgccgtgccctgattctgagatgctggcagacaaggctggggtggaagagcctttggggcacagaaacttgcatgggcaaagacccagaggtgggaaagattccagcaaattcgcctccctatcactggctttaaatgttttcattttatactcttaagatattttaaatggaatattcgccccaccctcatcccactaccctgacagctgtttattctccacattcccttctagtcctcgtctcttcacagacactcccatggttgtcttttctgctaatcttgagtttgtcgaacccacagtcagcttccaggtgttgctgggtctcttgcacaaatctcagcctcagtgtcttcctcaccaaagcaactcactcgactggacaaagacacactgaatcttgcaacattgccaatgcttggaacgatttcttcctgcagaggacagcgtggttttaataagtttaaaaagtatatttggagttttacgcctctccctcatcctcagccttccatatgtagagaacagaagacttccagagggacccaacttccttttccaaatgtatgctttgagctctcattagccaccctttgacatctagtccagactgagcctgcttctacccacagcaccccactccagccccagaacttgtcttgggcatgtagatgagcccagccttaggaaagctcctgccctagcctgtactctcacttctattttccaccttttaagtaaaatgatttgcctctctaagcctcagtctcctcaccataaaatggagataataactagaccttctcctctaaaggttgatgtggaggtaaaattaggtgctacaagttaagagcttggaattgagcaggtgcctggcaattattacttcctcaccttccttaccctcctcattatgaacagcaacttttggaaacacccttcatattttctcagctccactttacaaaataacatccttcctgggctgtcagcctggctgaacatgcgctagaagtatgtcttgcaggcatccctttgggcaccaagccaagatgtaaatgagattgttcgcaatgaagaaagtgtgagcttttgtaggatatatttttgtcccatctgaatgggaatcagctcagatgatagagcccctttcctataaggaggaaatgatgctactttcagtctcttcttggcttccaccaggttggtagggcagcctgagaaggtggcagcttcacagtcaggaaactcagtgggttgtccagcatcccaccatagtgtctggttggtttgtgggttgggtgggtgggtagatggatgggtatgtgcttggatgggtgagtaggtggtgaatgggtgcataggtggatagatgagttggtgttttggtgggtggggagatgggtggatggctgtataaatgagtggttaatggatggatggatgggtagatggatggatggatgaatgaataaatgagtagtggatagatggatgggtgagtagttggatgagtggacagacagataaatgaatgaataggtgggttgatggatagacagatggctggatggaacagctggatggatgggtgagtgggtggatgagtggatgatgaatggatggatagtgagtggatgggtgggtggatggatggatggatggatggatgggtgagtgagtggatgggtgggtggatggatggatggatggatgggtgagtgggtggatggttgggtggatggatggatgagtgagtgggggtggatggatagatggatgattaggtaggtaggtggatggacggatggatggataggtgaagggatggatgagtggatggatggatggatggatggatggatggttggatggatagatggatgggtggatagatgggtgggtggatggacggatgagtaaataggtggatggatgactgagtggtggatggatggatgagtaagtgggggatggatggataagtggatggatgaatgggtaagtaggtggatggatgcatagatgggtgggtggatggatggatggatggatggatggatggatggatggagtaaacaattccttccttcagttttgcatgcccttgatgagctggattgtagtttcccagattgcccccatgataccctgtgttccttatggtggtaataggtgctcttcaagaggtatgtgttggtctaggtcctctatggaggaaacgctaaaatggaattaaacatttaaggactttattatggaaaatatctgtgagggaaaatggggagggagctggagacagctggagagtggtcagacctcgaggcaagtcggccccagagagatggagagtgaaagaatgttgggtgaaggcatcctagactgcgtgcaacctaaagaaggtttgacaaagctgtccaggagtcctcaagccaagttagtcaacagaaaaatcccgtgtctcccaggagtgggctgacttcagatttatgtcatgctccatcgtttgctgggaagagcccaggggaagcatggactctgtgccaagacagcagctgggcctttgattaattacactccctatacttggaagtcaccaggtactatggccaacataggggaggaaagttctatagcggcatgtcttggagctgctgcattctacagtttttggagactcaagatgcaagttggcttagcaaaattgctaagaagccctgcaataaagaagcctgttgaatctagcatttcccaaatgtatttgactatggagctttttgtcttagcatgattccaaggactagagtttgagatcaagcgatctaggtataacccaagtgttcctaggccacaagagagaacaaaaaaaggaagggaaccataacagagaggaggcagggggaatggctctacacagaggcagaaccagcacaaatcatgtcactggttgctttcaacagaccgtgagatattaaaaaacaaaaacaaaaacaaaaaaacctagatatggaatctaggtattattggccaaggctgacacaagaacacatatttattttagttgacttaataatcaggcctgccatgtacacagtgcactacagtttacaaagctcttttctatctgtcatctcccttgaatatcaccatgaccttgagaatcaggggggagttatcatcctcattttgcagctgacaataacacttaccacagtgatcataactgttgaatttcctgagtgccttctacctgccaggcagtaacttaagcatttccacctttattaactatagtcttcttatataggaaggtgactgtggttcagagaggttaagggactgatttgaggccacacagccagcaagcagcagacccacacgtgaacccgggtctggctgacaccacagcccctggcagggagcgaggggcagcaggaacatgcagccccctctaaatgggttttttacaacctgctctaagtcacagcgagaagtaggctcagggaatgtaaagtgggtagtgatttttttctcccctattcttttactgcttttgtttattgaaggacaaatcattgctgttttcgtttgtgtttctagcacaataaaaataaaagatatgccggcaatctttttaaaagcttatacaattccagaatttgagctgtcggatttatgccgcacactgatctcatagacatcacagtgccatctgcctgggcccgccaagggcttccgaagttgtcgttatcaatcaaagtagggtggccacaagctcaggggcgacagtggccaacctccactgactgcagccgaggcctgtgaagaacagacactggctgtgtttcccttgctctgcccagagtctcaaagcagccatcttcattttattattgaaattgatgtaggcttgtagcagaaaagggattgcaggcctgggaggtgcctgctgttttgactcccacctccatagtccaatccttgccttgggtccgcagtgagctatgtacatctgcgtctgtgtagtgctcaggtaagaagagaatttgggagcacactacttctgtatgtctttacccatcagcctcccccacccaaatctgttccatgatgccagggacattatctgttccattcagtgcagcattcccagtgcctaggacagcacctggggcaggggcacagtggctcacgcctgttatcccaccactttgggaagccgaggtgggaggatcagttgaggccaggagttggagatcagcctgggcaaaattttgagacctcgtctctacaaaatattttaaaaaattagccaggcgtgatggccacctacagtcctagtttcttgggaggctgaggtgagaggatcactcgagcccaggagttcgaggctgcagtgaactatgatcaggccactgcactccatcctgggcgacagagtgagattctgtctcaaaaacaaaaacaaaaacaaaaacctggaacatagaaggtgctcaataaatattagttcaatgaataaatgaatgtcacatacgcatgaaaaacatgcaaatttgaggaccaggcaagggagcggctccccaccttggatgtgttccttgctccctcttgcagcttcttccttcccacacgtctctgagcctctcctctgccttctaagctctcctctctcttttctttcctctgctttgctgcttttctctgaccttctccttctccccaagatgatgtcaccaagttcagaacttgggatgacccaggaaggggaagctgccagagttaaggagactcagttctagctctgcctctgatctggtctcagcctgagttctatctctctgagcctcagtttcctcatctgtaaaatgggtgcagtgtgcccaccaccgtgcctaccgcagaggtatttcaaggatggggtgaacacaagctggcaagtggggaggaagtcagaaaaaatgaagccaattatcattgctaaccaaagacaactccttgtcgaggaaagcaacagctccctctgtaagcacgagcgtgtggggtgcaaggagcctttgttttggagttcagcgggaggcatccaagtggggagcatgaacatccactcttaaagtctgaagctacagatgtcaactgtcagtaagaccgacagttccattaggcagctgcccgctctccccgtgagtgattaaaacgtcgccatccatcccccatgctatacatcatctcgccaggctggcacttcatcaagggccatgaagcggggacatttgcatcctcttcctcgggctgcaccaaggcggagttggtggagacatctgtgtagcgtagcgtgtcctgggagcgccttggaaacaaaagctggggaaggctcgaagggaagagagaggcccaagtgcatggagcgggggctggctagaggggccggatgctgcggctccaggaagcagggaccagggcaggagcagtcactgggaattgaggttgggggccccgggatcatccagcccctgccctcattttacagaccagcgaactgaggctagggtggctgagctccccttgttcggccactcccaggggaaagtaggatgttttgagtaatatctgcctcctgcaagggcctgcgttcattccgcttaagttgccagggtgttgcacagtgtctggtgcacactgggtgtcatgaagtgctgactgattccaagaagtggtaaccagagtcgcagggtcactgccacactgaggttccagctgaacattacagccctcatttgagtgtttctgaccaccatctgttattaattctaatcatcgtcatcctcatcaacaataatagcaataatatttgccactaacatttttgagtgtttactacgttccgggctctgcactgagcacattaacacaaaggtttcgagtctcttgtcatgtgtgtgttcacagaaaccctacattctataaagtcatgcacctagaatagcagggcttatgggaatagggttggggaagatcattccaaaactttgggagttttgtaaccagagaatattaaaaaacaataaaactccctagaagaatactggcgcagctgaattggtacctagccttcctgtcggtatttctatgctcccagaaaggacacatttaagagcttgcgctttctctttcaggatgttgatcccagagggcattcgcttctgatagagaccattttcatcaaaattaaaaatcgaatccagactgctgcctttatcattcatccattgtttccatagcagcagaagtattttgagtttttccatcttactcacggctcccccagatagcttagcagcagttctggaagccactaaatcaactactgcttgcaataaagaaaggcacttgggtagattttctacccccccttttttttttttttgaaacagagtatcgctctgttacccaggctggagtacagtggtgtgatctcggctcacttgcaacctccgcctcccaagttcaagcgattctcctgcctcagcctcctgagtagctgggactacaggtgtacgccaccacacccagctaatttttgtatttttaatagagacagggtttcaccatgtttgccaggatggtctcgatctcttgacctcgtgatccgcctgcctcagcctcccaaagtgctgggattataggcatgagccactgcgtccagcctatttatgctttttctaatgttgagaaagcatgcttctgattacttcaaaatgtgaatgtgctggggaagatgactcataaaccaacatgaccttggcattctactaacccaagtcccttactgaccaaccacatgtgaggttggtcatctgtgacatgtttaaggcaaagagactgtatcttgttaaatcctcacaccaatccaaggaggcttatacggctaacatcatcgccattttacagacgagaaaaccaaggcttagagaggttaagcaacttgcccacggttactcagataataagtacagcaagagtttgaacccaagcaaccatcctcaccaccttccacctcactgccatggccatcacacgtgtgtttgctttcgctgttgcaaacttgaggacggggccacatcttttttgcagctccagcacccagcattctgtgtggcacagaccaggccagcagaacgtgtttgaatgagtggctctgttccaggagaggtttcacccagaaagtcccacaaagatgataagggagaggctgccacctgcctgaggaaggtggccctgccaccctgaccaccagatccctcccctaggcaggtgtacctccctaagccccagactctggaagttttatattggtttcctagcccagctctcagaaggaaacctatttctccatttggggtgtggttccgagggcctgctcacagtacctgagagacagcacgcagtctttctccactctgtcctccaggccctgcacagtgctgggatcagagcagaatttggggatactccctgagttggaccagctatgcctttgtcgggttggcccttccaccatcagatgtgtcagtccttggcgttaatcccttccagtgcccagcccacctctcccctcctagacggctcacagctgtattagggagatggtccacttctaagtgcaccaggatggagcagccatctaggtgggtccctgcagtgttaccttcttatcacattgagcctgggcctgcccaggggaccactgcccaagacgccggctgatgggataatacctgtaaagccagcatgcccttcgtgtcccacagctaggggctcccttctgcggtggtggggacacccactcactcccatactgccagccttcagctgccccaccgctgcgatagcccctggagcagaatctcaaacaccccacaccctgtcccaaggaccaacccttgttgcatgtgcagagggcccatggagccagcaaatgtgggcaagcaagaacaaaggcacccctcatcagaggctcgtttggggtgtccattcagggggcctgttgagggccttgaatcctggtcaaagctaggagtgaggccttcggggttaccatgctggggcacctggctcttcccacttccacctgggcgttgacttatcctctctgggcctcagtcttctcagccatgaagtgggatggcaaggcccgcctgaaggagtgggtgcctgtgcagcaggcagaacagcgcccaatacatagacatgcttaagggatgtcagctcttcctgacattggacgccttctcatagcagtcatcacactgtgtagcgatcgctccactaaccacccctgcaactgcaggtcactgggggagggacctagtccagctcacccggaatcctcagggcctagacatggagacccaggtcctccggaagagtttgtgagaggaatgagaaatgcgcctggactttggaacaagccaaatgaagtcatatctcagctcctcccattccctagatctgtggttctaggcaatttgtttctcctttcaaaatctcaggttcctcacctgggaggcaaacgtaaagtctggatcttgggggtctccctggatctccttctccttctctgcgtccctatctcccctcccctaccatctccctccaccttggggctgtctaactggacccggcactggacagctccaggtgtttgcatttgagagttgggctttcctggggcctcagagtagaaggtgggatccaggtggccctgagagatgggctgaggcccagcaggtgtggacacagcaggctttccatgcttcagcccagctgatcttgaatggggagtccagcagcctgagtcagccatgcggcgatcagacggtgccaggcctgcgaatgaggaggaaccggagccaaatccttcccgggaggcagcagctctgtgatgttcccttatcaaaaggcccagccccctccccacctgcaggccctgccccctccctgcttcttcccactgtctaggcttggtcagcgttttcagcctctgcccatgccaggactagcagttctgggcggacttccaaagggccagatggtctcgcaggtacacttgcccagggcccatgccactggcagaagatgacaagtgcaagccttggagaactgactttgaaatggggcaagaggctctggggtatggattgcagcttctataatcagaaatatcacttcttctgcccgtgtaataagattacgtgttagcttttattgtgtgtccttgcgtgccaggctactcaaagtgtggtccctgtaccagcaacatgggcctccctaggagcttgttggaaatgcacattctcagacccctcccagacctgctgaatccaaatctgtgctttaaccagatcctcaggtgattcctatgctctttgaagtttgagcaacatttgtttcccaggtgaggaacctgagattctgaaaggaaaaatggaccatctagaaccacagatctagggaatgggtggagctgggatgtgacttcatctggctcactccaaagtccaggcacattcctcattcctttcacaaactcttctggaggagctgggtatcatgcctaggccctgaggattccagatgaagcagactaggtccctcccccagggatctgcggttgcagggatggttagaggagcgatcacaacacagtgtgacgactgctttgatgagaaggtgcccagggcagaggggcacagaggaggggctgcagtggacaggaagggcatccaatgggagaggacagaggagacttgaagagcaagcacgaacctgcccaatgttacctcgtgggtgccaggcgtttttctacgtggtgcacaccctctgtctcatggaatcctcaccacactgcatgagataggaatgatcttcagccccatttctcagatggggcatctgaggcacagcttacatgccaaagctgcagagtggatgcaggtggtaggagggggatttgaaccccttagtctggctcttactcccacactgtcctgcctctcagtgggagaagaacattccagacggatgaaatagcctgaacaaagtgcagcagtgcccttaatctggtgcatgatccactgcaacttagtgatagccccaggctccagctgtgtctcttggcccctctcccagccagtcccaccactgacccagaatcaggctgctcaaggaagtctggggtcctgacctgtggtcacttggcccatattggtgctagtacagaagttctccatctatttcaagagctcccgtgggggccgagacaccacagctgatggggaacggtggcctgtggaccacccttgggcaagaaacgaagatcagaggaagaggaaagtcagcatgaagtgagaggagagagatgtacttctgggtcaggttggcctggatttgaatcccagagaagctgcagagtctcaggcagggacaatgtacatggcctcatgtagaactgcatgtggaagaccctttacaagcccacctggagggccatcagaggaccaggggtctcagttccatgacaaccctagacctaccccccggttagatcatctggccctttgtgagtgaggtttctcatcttacaggtgcagaaactgaggcacagagaagaaaagggacttacccaacaaatgcttgttgagcttgcatgttgactggtgagtgcttccagctaccatagtgcctaagacagactctgagtgcctcgtgttttatggaggactcttacacatagggctttcctttgcagtatttcaatcacctcttgttttagttcattttgtgttgctataacagaatacctgagactgggtagtttatacagaaaagaggtttatttagctcatggttttgcaggctgagaagttcaaggacatgaccctggcttctggtgaggacttcttgcagtgtcacatggtggagaaggtcaaaggggatgcagacccacgtgaagagacaaaacctgaggagtgtcctggctttatgacaacccactcttgcgggagctaatgcatttccatgagaactaatccagtctcaccagagtgagaccctgctcactcccatgagtatggcaggcattagaccattcaatgaggaatgcacctccatgacccaaacatctcccactaggctgtacctgtctgccaccgcactggggatcgaatttccacatgagtttggatggggacaaaccacatccaaaccatagcatctcccctagttcctaaagggaagggaagtatctctttgataaagtgtgaggccgaattcaggatggcagaggcattagttgccagccgctctgatgtttctgagcttgttagggtccagccaatattctcaagaaatcggctttcagaaatagcaacactagatgattttatgggctggagctcacctggctgtggaggcgggctggaaggacacacaggtgcaattattccagaaacacaagcagacctggagtgcagaggaggtgggtggaaggagggactgttgtttttaatttagctgtgagacgacgggagtctaggaagcatggctggggaatttaccagggctgttaccagcccgtttccaacctgctaaactgattaggactttaagactacagtgcattgccctctatagttccttgccttaatatctgtctccctaagacactgaagttatttttatctattgcattttgttctgggtggaatgatccttccccagtcctgctgataaggagtttctaagtgaatttgcaccctgcatgaaagttaaattgctgccttttgtcatttttttgttaacaccacagccccagctctgcccaacaccaccccaccaacacacatctgactccacccttaaaagcctatgcgcctcattctctgactcatttgccacccagttggatggagcacaagtgaccaaatgtagtcttgcaatgagatgggtcgggtcactgatgtgatcatttggcatctggtcagccaggccagtgtccatgagtggggtgaaatgttatagggtcttccttgctcttggcattaggaacacaaacctggtagctgttctgcgcaggaaagggaactagctcatattgaactgctcctatgtgctgggcactttgaataacccagtgaaaatcccattttacaagtggaaataccgaagccagacagagcttgctcaagtgcacatggggaatagcagggttggaatttgaaaccacctctaaagtcttgcaaccgcgctaagccatcagcctatgtaattggaatagaagtttccaggggaaagagaggaggaagcctgttctcccctttaaacagagggagcggctgcttacagagctactgtcaaagcagttcggtggagggattgatttttcaataagccaccaaaatgatggtacatttactacttatgttactgacaaggagcacattagtaattggaatgtgacattgggatatggcaggtgagtaataacgtgatttacatccttgggggtttgggtttaagttacgtagtagttattgcaagggtctgtgctataaaatcagactctgagggtggtcagggaggctgcagctcttgggaggataatgggcatagaaattggggaggggatgaaaagaggggaagggaagaccagaaataactttccccacgtgcattattaagtgaatgtgaagaatacatattccctgcttttatgggtacctatgcattcatgcctaagtgtgagcttgaactgtaccaaccctagaggtttctttaaagacaagtgaagattcaatgctaaggaattttgaagaaggaggcaatatttccataggtggcatagctaaagacattacaaagggctgggaattaatatatacataagcgcatctgctctaaacacttttttccctttcaattgttccccaggaaggtcacataaatgctcattaatatgaacactatgttcattagtataaaacattccatattttatttctattttggtagctcaacaattcactaagtgtgatgcagccacacattctttgggtttttacattttggggaataaataggcaatgaccttctgcgaaggaggaacttctacttttcatgtgtttcctaaatcttggattattctcaaggacaatggccattatgtccattcttccaggataaagatgagcatatgtttgttgccgggctgttgcagagagtttgcaattcaatcggaactcagacttttttcctctgttgtcatcctttgatgcttctccttgggaggtgtgtgaattggagttgcttaattaagcagaggaagctaaaagatgctttggaaactatcttcatccacacataggggtttctgcagaggataacaatttgcactcgaacaggagaacatgggcataaatgcaccaggagaggtttgggattggatgtcaggggagagaaggaagccaaccacgcgtgaaggtggagagcacaggaatcctttggactcggcgtcaggttactagctgtgtgacctcgcacaaggcgttttgcttctctgaaacacagttttctccttttgcaaaatggggtaacaatacttctttcagagggtatgaggaggctacaacaaattagtgtatgtcaagcacgcagtgctggccaggcgtggtggctcccacctgtaatcccagcactttgggaggctgaggtgggaggatcacttgagctcaggagttcgagaccagcctaagctcgagactagccttagcaacatagtgaaaccccatctctgctaaaaatacaaaaattagccaagcatggtggcacacatttgtggtcccagctactcctgaggctggactgcttgagcccaggaggttgagggtgcagtgagccgagatcgcgccactctactccagcctaggtgacagagtgagacacactctcacaaataaataaataaataaaagctggcactaagggtgatttgaaaggggcctccttggatactctgaggcccaactcattttgcaatgttgagggcgcccgctggctcattagaatttctgtgactttctcccaatgaaatgttttgtcgctttatttccccttaggctattttactcatcatctgggtaaaactaccccagatgttttaattcagagtctagcccaccctcctttaagcaaggctcatgggaagagtggcccctttttattttgctttttgtaacaggtttcttgagatatagttcatataccatacaattcacccatttaaagagtacaattcacactcacttcttaaccaattttagagcattttcatcacccccaaaagatactctgtacctatgagtagtcatttcttatcctcccccgacttcccagccgcaggcacccactcatccacattccatctctatagatttgcctattctgtgaatttcacgtaaatggagtcatgcaatattgggcttttgtgtctgacttcttttataatttagcataatgctttatccatgttgcagcgtgtatcagtacttcattccttttttgtgatggaataatattgcatgatatggatatgccacatttctttctttttttcttttttctttttcttttcttttttttttttttttgagacaaagtctcactctgttgcccaggctggagtgcagtggtgccatcttggctcaccgcaacctccacctcccaggttcaagtgattctcctgcctcagcctcccgagtagctggaattacaggcgcctgccaccatgtccacctaatttttgtatttttagtagagacggggtttcaccatgttggcctggctggtctcgaactcctgacctcaggtgatccaccggcctcggcctcctaaagtgttgggattacaggcgtgagccaccgcacctggccaatatgccacatttcgtttatccattcattagctgacagacgtttgggtcgtttccaccttttggctgtcgtgaataatgcagctgggaacattcatgtacaagtattcaattcaattctgcttctcccttaagaatagatctctgtgaaaacaactaagtattggcattgctagaattgaagacaacatacttaaaaggatacaaatttagaggcaggtcgaaaaatacccaaattcctcctatatttgcactcttattccactggcttgcattgagagaccttaactgaacagcccctgtaactcgccagtgaatatgctgtagagatatcattatagatgttgtcctcggtctctcatcatgtacatctcgtgaagatccatgagataaaatttctcatcttccatgtattaagaactgcaattctcacgcctgtaatcccagcactttgggaggccgaggcgggtggatcacgaggtcaggagatcgagaccatcctggctaacgcagtgaaaccctgtctctactgaaaatacaaaaaaattagccgggcgtggtggcgggcgcctgtagtcccagctactcaggaggctgaggcaggagaatggcgtgaacctgggaggtggagtttgcagtgagccgagattgcgccactgcactcactccagcctgggtgacagagcgagaccccgtctcaaaaaaaaaaaaaaagaactgcaattctaagtaaccgctcagtgcacgttctgtagcaagcacgtttcaggtacctagtctattttgtcctccaacaagcctgccatgtgcaagaagtattttgccctccatttcacagatgagaaatcagaggtgggtgactggcccacggtcacgcagcaggaagtggcagagctgggatttaaacctaattctcttttatcctgaggtccaggctcttaaccactatctacatgattgtgtacatttttgaaaatccggctcaaatctttcctgagaagtggaggggaggtatagatctccttaatctttaacttctttcattcactgcttaatttaaccctgatctgatcccaaatctgattatcactcacctactctgaatctaattagaatgtccttctggtattttaaggccatcaggattgcctgatatcaaaagcccttatctgtcaatgtcttttctctatcacagctgtgatcagttgcttgagctaataaggagggcaggattacttgtccttctaggtttttctgcatgtctaaagcattccgactgcttctcctcctattcccactatttccccttagcgctctgattatcagccttcaaatctcagtaagggaaaggataaggatgcggcagtgggaccattctcccatgaagccacgcctggatttctctccccagtcatctttttcctggcacagaatttctcccagacagggctgctgctgcttgaggttacatgaagaacatcatgtcactctcaccagtcactttgaacaagagcaggaaggacccctgctccccaggccaagagaccctctgttccttctccaggtaccattgcaacagtagcaggaataggcctttttccttccttccttcttccttccttcctttcttccttccttccctccctccctcctttctctctctctctagatctctctctctctctctttctctttctttcaacagggtctcactctgttgcccaggctagagtgcagtggcgtgatctcagttcactgcaacctccacctcccaggttcaagcaattcttccacctcaccctcctgagtagctgggattacaggcgtgcaccaccatgcccagctaacttttgtatttttagtagagatggggtttcaccatgtcggccaggctggtctcaaactcctggcctcaagttatctacccacctcagcctccaaaactgctgggattattacaggcatgagccaccacgcccggacaggatatgccttttaaaaatattttctcttctttctggcactgtggtcagagagggagacctatagactttcttctggaatttgttgagattttctttgtgatccagtctgtagtcaacttctgtacatattccagggacatttgaaagaaaatcggtattttctgcttgggtacaagcattttagacacagcacatacacactgcacacatatacctaccttatatgtttgtattcaacacacgcatatgctgagtggagtttaattgtgttctcagaatacatctaagcaaagcaaagtttatcagctgaaaatataaagtcttttctcaacagacctaaaataaattattggaagaagctgaacctagttaatgaagaatctgtctgcatttttggcactggggttggtcatgaaaacgattacttcttatcagattcgagtggctaagcgtttcgccttcacttggttctcttgtctcttgtccctggtgcatgtgaaggaagggaaagagagaaaccaaagatacaatttgtgcccctagaatagtattaggtggtgccaagtaattgcagtttttgccattgaaagtaatagcaaagccgggtgcagtggctcatgcctgtaatctcagcactttgagaggccaaggtgggcagatcacctgaggtcaggaatttgagaccagcctggccaacatagtgaaaccctgtctctactaaaagtacaaaaattagctgggtacggtgactcaacgcctgtagtcccccctacttgggaggctgaggcgggaggatcacttgaacccagaaggcagaggttgcagcgagccaagattgcaccactgcactccagcttgggtgacagagtgagagcctgtctcaaaaaaaataaagcaatggcaaaaactgcaaacgcttttgcaccaacctaatagaaatagcacaagtaggaacaacaatgggatgtcatcattgagacataaggaatgcactaaaggatcctgtttctccactaatgtttgttacttcattcattgagtgctgaagtagacccttgctgtgttctatccaccaccattcattactacgacttccttccagggaattacccctccccacccttaattcattttgttcagctaaggttcgctccagaggtgggcatggggctggggtcctgagcattacagtccccaggccacactgattgatgcaaggtaggcacttgacccaagcagagctagagacacaatgagactttgactgagacccctgcccaagagatgcatgcatacccattgaacttgaacaagggagaatatgaggctggagctgctagcagccactttgcgaccaggcggagagagccgatctgagcagggaaccaaccagagggaggggagccaagtaatgctgaaagggagaaacgggattggtggcatcatttcagatccttagccaagctctagctgcatgtagaagctgcccttggactttccagttaggtgagcccataattttatttaaaccaatttgggttgtgttgtcagtcatttgtaatggaaaatcctgactgcctacagcgcctatggtgtgtgatggacacctgaaggataaaggtataaatatgaacaagaaacagtccccctcctctcaaggatcgaataatagagtgagattcgcacagatctcaaatcataattaaaacaccacttgacaacggccataacaaatgtgtgaaccaagtgccagcagacccagagaggaaatgaggaaccagccttttggttgcccgtcggcagaaggcctgctgcaaggaggggtttcggagtgcccagcatgggggcgttgaatctgagaagaggaacctggctttctcggggtgctacaaggccaatacctacaggagtttcccatcccagtgcacctccaatcaattgagctcctgttccaatcacacctggtagggatttaattgctttggattgatttttgccagtggtgactttcaaacccccagcctgggaatgaagagagattagtcacatcaggggaggcctactgacagcagcgaaaatcagcagggagtgaagatgatttaaactagtctttccaatcagcctcccagactgtacctaggatgcgagcagccattttaacaaatggtcacctgggagtttcgaatcagtataaacccagcactgatagtcataggagctgtcccgtgctatgtgctcataatacattgacactaagttcttcatatatattcgggatgtgctcagctttgcaaaccaggacacagaaccaatttcaccagttatttatcactggcacaattcatgggccttattagctatcgatgactagtgtcattgcccctgcatatggtgtctcatttcatcttcatgacaacactgagacaagcgcaatgttgtacccatggtacagatgaggcaagagaagttacccgcaaagctgagaaaaggtggagctgagattcggtcttagggccattctgttgctcccgtggttccatttatggattatttcacaggatgagacgcttctgtagctgagtctttgtatccctttctctttctttccactgtcaggtggtgagcttgctctggggactgggtgtggcctagagccctgttatgaaacacctggagggctgtgtgcactgctgttctcgcgtttgccatcaatgtgggatctatgagcagccaaaggcatcccccgggaatgtacagagggtgtcttgggcaccctgagtgctccaagagtccaaagagggagagatttatccttcggtgtgacaggcagaccccatcggggcagcagacactctgtccctccgggggatgccaggtttctgctgtgttgggggatgaatgtgattgaacaaacctctaacctcacctggaatgtttcaaagacagctttgagcagaagtggagagagggcccagccaatggggtccctcctcattttccactcagtcaggatgcaaagcttggattttctgtttacttttcaaacacttctattgaacactagatttgggggatcagagaggaattggattcaattcctaaccttaggggctgtagcagtcaaagagagagaaagatgtgtaaagaatcaaaataccatccaaatcccgtgatggctcttggtgtatatgtgtagagtgctctgagaacatgggagagggaataatgaactcagctgaggagttcatttcaggggaaactgaaggtgcacgggggatcagcttgaactggtccttgaaggatgaatgagtcggagtaggggcacagaggcatttcaggcagatgggactgagcaggccaaggcacagagatccagagtgcatgcagtgtgttcgggaggagtcagtagtcctgcagaactacagcctgagttggggggatgtgcagctgaaaggtaacagattcatgcattcattccttcactcatgattcttttccttcatccagctaggaggtaattattcagaggctgttatgagccaggcatgggtcaaaacagaaaaatcagctcgactcagtgagagcccaatcttcccattccaggaagcctagcagatggaggattctacccccaccagcaaggtccaggcttaaagcaagtgcaagggtcacctcaaatctttctttacaaggtgaatgttaaacttcaagtgtggttactactgaaaagtgagaaaagctggaactacaatgtcaagggactgtttcaacaatggttcacatgggggccgggcgcggtggctcacgcctgtaatcccagcactttgggaggccaaggcgggcggatcacatggtcaggagttcgagaccagcctggccaatatggtaaaaccccgtctctactaaaactacaaaaattagctggacgtggggtgggcgcctgtaattccagctactcgggaggctgaggcaggagaatcacttgaacccgggaggtggaggttgcagtgagcagagattgtgccactgcactccagtgggggcgatagatggagactcagtctctaaaagaaaaaacaaacaaacgatgggctttgctaagtgggtataaaggtgggacggacacagccctaaaccttgaagttgaaatggtggcaaaagcctggcagctggtgaacgtggtttttttgcaccaccctccatcccccaacagcatctggcaacatctgacaggctacctgctgttgcattcagaggacgggctctggattcagattgctgggggcctgtatcagcggcaccactttctggctatcacttcccctctcagaccttggtcttctcatgtatgaaatgggataataacaacacccagcccacaagatggttgtgatgttgtgagatgcaaacgaattactgcatgaaaaaagctcagaccagcagcccctgccaggtgaaactgccattagtgttacccagcaccatgctagacccaccaaaacattgcttgttggataaaatagcaaaccccaggtaccatctcctcaatgagatctttccccgtccaaaatggattggaatgtgtgagaggaagctagctactcaacactggatgcaaagattcaggcaggggtggaatggggaccttctacctctgcctcttgcccaaggtcagggacaccgttctcaccactagacaaacttcccatctggaggcaccaagaggaagagacttttccagagaaatgtagctgcggctcctccccagtatgaaaatagatcgccctgggactggagtagttaatgaagatgataattagaattgcttattaggacctgtcttctgaagttcatttgtgcttttaatagaatctacaacacatctgcttagcagagatgacagatcttcctgatttggtgtattttaagacaagatctttgcgccctggcttctcctggtctccctcctcccccatgtctgccatctgctgctgcggtgaccttccctcatggcagaagcctggagactgcaaccagaaaacacccttcttcttgccaggggaccccctccaccaaaagccagagagacgtctcatctctttctgaggaatagcaatcccttctacgaccaccctcccccttgctctccagccatcctgcctgtactgggttggattatgtgtgccctcatcccaaattcatgtctacctggaatgatagaacatgaccttatttgaaaacaagatctctgtggttataactagtcaagttaagatttactggaatagggtgagccctaatcccaaggtctgatgtcctggtaagaaggccacgtggatacacagggaggaggccgtgggaccacagaggcagagattggagtgaggcagccacaagccaaggagtgccaagaaaccaccagaagctgggaggaggcaggaaagattctctcctgaagccttcagagggagcacagccctgccgacacctcgatcccagccatctagcccctagaactgcaagatgatacatttccgttgttctgagccatctgctttgtggcactttgttatagcagccctgggaaagtttttttcagcttctcaaacttgccgagctctctcccaattccatgccctttgcacctgctgttccctctgcctggaactctctttcagcttcccctccccactcagctcttctcctgtcccatccccacatcacctgtccaacccctactttagagcgctttgcacatagatgactatgcaatgaattacctcaccgaaagcaggtgacctgtacagaaagcaagcatcccgatctccctgagttttggcgagagccccttcctcagtcccataagctcctggtcaaggtctatgcccatcttgtcatccttctgtccctggagcctggcatgcagttaacatacaagaatttgtggaagggtctggcacagtggctcacacctgtaatcccagcactttgggaggccaaggcaggaggagtgtttgaatccaggagttcaagaccagctgggcaacatcttttgcccccgtctctgccaaaaataaaaaatgaactgggcatggtggcatgtacctgtaatcccagctgctcagaaagctgaggtaggaggatcccttgagcccaggaggttgaggctgcagtgagctgtgattgtgccactgcactccagcctgggtgacagactgagactgtgtctcttaaaaaaaaaaaatgttgaaggataataccattgatcctacaattgctagacccaaatgaatccaaaggtccttccagcccttccaagaccttgggcctcactccatgagcatccggacacctaatctgaggccccaggcatggaatctgtgctggcctgagctgtggggagaccctggtctatggacacctcttgagatcagtggagatacacaataatggagaatgctgttattgtcatggcataaatttggattggagaagacagaaaagaagcaggatgctaagtgaggctggccacgcccctgcctccctgatggactgctgaccttgcaatgcccttctcttgaatcccaagttcgggctcgttttttccaggcctcctctgctacaatgcttggccaaggcccagccagggccctccctgtgcaggggagcagccacgttcagggccctgtgatcaatggagcgtggaggcctctcggagtcctttgctcccctctccctcctcttttgccttgaaggtctgttgttttgtgagatctgcgagagtggggagagtggggagatttattttgcactgaggctgtgagtgggctgagagagaagcagaggacaaaaactgcactagacttagaccaggcaccaaaatagaaagcccaagaccattgtattcccccgggacctgactctggccatggtgctgatgatagagttaccgttgggttcagggatggtgcatcctccagctgggctccaggtaagacaggctttttgacttctctgtgcctgtttccagctctgtgaagtaggaaaactactagcttccatctcgcaaggacgccgagaggatgaaatgacagagcacgtagttgtccgtagactgatgtcaggtgctgctgtttgtgttattaatgacaacagcagtcatcctattcaggtgcttttgctaggactgtgacttctgtctctgctttactcggtgtctttgaagacacccccccccccaccctgggcatggaggcattggggcaaagggcagcaggcaggtcagctggcatggcccctcgtctggggcttgtccctggctatgtcctcagctttcctgggctgagccagtgatgtatataaggctgtggactgcacttggataggtggagaggagacagacatgacctggctacagggaggacagcagtgggcaggcacagcctcacataagcacagcattgcataggcaggcatcgcatatgcaggcattggatacacaggcatcacaaacgtgggcatcacacaggcatggcatcgcatagcatggcatcacatacgcacagcattgcatacacaggcatcacatacgcacggtatcacatacacaggcattgcatacacgggcatcacatagcacggcatcacatacgcagccatcgcataggcgggcatcgcataggcaggcatcaaatagcacgcatcacatacgcaggcatcgcatacgcaggcattgcaaacacatggcatcacatacgcacagccagggctgcgtctgaggccactggaggggaactgttcttagacccaatggctgtctttactactaattgctattgcatctattgggcaattagagggtaccaggctgtgggctttctaacactttcctgggatgggagccattttatagatggggaaactgaggctcagagttggagcaactcatctagggccacacgttacaagacctgggatttgaaaccaagattagtgactccagaggctgaaatcttaaccacttccccgtgggcccttcttgaagtgaatgtctaaccattaccacttttccactgggtgaactggagtcttgtagacccagaacatctgggcagactttgagtttggggaggggaatctagtaggctcctctgcagctgtcttcatctctgcatgtccttccagaaatggggccaagaggagccaggcatggtggcgtgtgcctgtagtcccagctactagggaggctggggtggggggatctcttgagcccaggaactcaaggctgcagtgagctatgatcatgccactgcactccagcctgcacaacagaatgagaccccaactctaaaaaacttaatagctaagtaaaaataataataaataatccgaaatggggccaagataagagaactgaatcggggttggcgggggggtgcatctgttctactcggtgatttttcccttgttgatctgtgtcccccactccagcttgggggccccggtggtattgtgggtacccacaaaatgctagtcaggatgccagattccccttctctagttcctgctagcaccttgggatgtgtcctagtgagaaccgcagacttgccaaagccatgacagctggatcctattctagccgcaggttgggatcgaagtttagtattccagcttccaccatccccttcctgcctgtcttgacccttccagtttgctcctttaaatctccacttcccttttgcacagtctcaagctcttccaggttctgaggattttttctcacttctcagggtgagctcgcgacctttcattgccttccctgtgtgagcacaattcaggggtcagactctggactctttatggagcctcaacgcaggggctgtgactgtatattctgcacagcgaggctctaattacaggctgcatgctggagactagtcattttgtgagtcattaggatgtgtggctggggctttataatatcttttgatgagttctgtaatttttatatcttcacctatgctagcattttcagtgaagcagaacaggacagtagggctggcagatgtcacagcccctgggctctttctggatcggaattgaaagggtcttctcctctgcactctgaggagagaaatattgattctgattgggttcgaggggttgaaagctggcatgtgcctcgtctcttgctaatcaatattccaaagcagtggttgtgggtaatgtttgagtacttgcttctgttctccttcgtgttggcaaattacaagctttcaggtgagactcccttcattttgcagtggctgcgaggagcaggtttaattagcgcacagacctgctggaaaaatccagtgttattaaaagccttgttccatgtggtggctgctgggttgtaccggtctcctgccctcagccccttccttcctgaagccacccaacacccaccccggcattactttgccattaatcccaaggtatccggggaaaaatgacagagaggtaagaaaaatcacatggaaggtagaatgtccagatttttccccaatgagatgaaaaactcagggtctcatctctgtggaaaatcccagtatctgtccaggagcactgggcctggccttgaccttggctttgaccttcagacgactgctggggagattccttgaacatggagtctagggcctggatactgggaaaaatcagacccttctactcaaaaccaaaagaccacaggctttggagttaagacagggtgaagggtgagtcccagctctgctcctcacttgctgtgtgactttgaacaaatggcttaacttctctggccctgtttcctcaactgttttttgttttttgtgtgtttgtattgagacagagttttgctctgtcgcccaggctggagtgcaatggcacaatcttggctcattgcaacctccacctcctgggtacgagtgattctcccacctcagcctccaagtagctgggattacaggcatgcactaccacactggctaatttttgtatttttagtagagacgcggtttctccatgttggccaggctactctcaaactcctgacctcaagtgatctgcccaccttggcttcccaaagtgctgggattacaggtgtgagcccccaggcccggttttcctcatctgttaaatggggttcacgaccgtgactccctcatgagctgctgtgatgcttcatgagatgaggagcttcacatctggcacaattaatggcccatggtcagctctcaatcgggggcatttgttgtgaaggttgtgtggcactatgtgtcactgtggccacactgttctcattattacatatatgaatcttactccacaaccaagtgtgcaagaaatctcaccaggcccaaccctaccagaatgataagaaattaagactcatcatatgaatggccgcctccacacctgcctggggtcacacaataacccagaaggcttgtctgatatctggagaatgaggaaggggcctggaggcttccatcctccatggtctcagctcacctgttctttgtccaggcccacctgatctccaagaggtggacagtgctgttgcctgagcccaggtgtgtcttcagtgaagtcagaagctccagtgttcaaggtccagaccctccaccaccacacggcacctatgtgccctctttagtcctgcacctcctcacgatgctggaacagtccaggcacagttgtcctgcagacctctccttcctaggtttggggaattgcccaatcagctctcttctagaatgttccacagcctcttccccaattccttccatgaaccttctgcttgaggaacaagagtcaagagggaggtttgcttcctggtaaagctctggtttccttttgcatacaaattgccctgcagcaagggagctggaggatgggcttcctcttcgaataggaatgggaaactggggaaaagtgtacaagtcgctctggtctgggattttacaaacacaaattattatctccatagggcgtgccacaccattattatcagtgcatctgcaacaggggaggcgtaaggaagatgctttctgtgcatctgacccccaactcccacagcctgaactaaaaatatcacctgcagtgagcctgagacatctacatgagcagcagtgtgtgtgtgtgtgtgtgtgtgtgtgtgtgtgcacctgcatctctgtgtcttgatgctgtgtggtgttaattctttgactgcattcattcaccaaggcctgaaggcatagtatcctgattgaccagatctgagtcacaggctcacatgctgacccttggaatcagagtggggtcagccccacgtgagtctcagtgtcatggactcagagtaggggagagaaaggtgacccgggagaatgggggtgtttagagggggtgggccaggaggaaatcaggagctcagtctggagcatgctaggctggagatgtctgttaatcatctgggagctaccagaagaagggggcatgaatatgcgcagacagcaaggcaagaggctattgctggcagataaacatctaaattcctgcactcctgtatcagaagctgaattagggtgcaagcgtgtgggcaccagtcccttaaattacccttctttggaaggaataatggacttggagtcagaagactagatttcaagactagcctctgcttcatactgactgggggacttctctgggtttgttttcttgtctgcaaaatgggatataataaactactactttagggtggttatggagcagtgctgtctgatagaacttcctagaactttctatttaatatggtagccactggccacatgtggatattaagcaattaacatatagctagtgtgactaaggaactgaattttttattttatttaatttcaatgaatttaaattcaaacagccacatatggctaacagcaaccatattgtacagtgcagttttagattattcaattggatcattacagtttgctttgtaaactgtgaagtgctataagggaatattcattgcatcccttaattgaaagctccaatgatgaagccaggtactgtgtgaataagtcttgctcatgctcataattattgtaaccactgatctaagtggggcctgaaatccttaaaatggtcttatttctggacatctcccttcacatttgaaggattaatataatggatctctcatgaacctatacagaatcccagtaagaaattattgcatggatggatggttcgatggatggatggacaagtggacagatgaatggataggtggatggatggatggacgtacagatggatgggtggaaggacaaatggatggatgtacagacggatacatagatgaatagatgggtggatggatgggtgaatggatatatggataaatggatggttgggtggatggatggatggatggatagatggatggatggatggatggatggatggaaagatgagtagaagaacatatagaaggatacatggatggatggatggatggatgggtgggtggatagatagatgaatcggtgggtggatggatggatgggtggatggatggatggatggaaggatggatggatggacagatagatgaatggatgggtggatggatggatggatggaaggatggatggatggacagatagatgaatggatgggtggatggattcatccattcattccttctgtcacctgctatgcactaggcattattcaagtagttagggatagaataataacacagacaaagctcctgctttcagaaagactgtattctaaaggggagagtcagatgttcaagaagaaaacaaatagcataaagaatttctagtagcagtaagcactatgaaggaaaataaagtggggaagagggatgcagaataatggggctgctgtttcacatagggtggtctctttggtaaagcagcatttgagaaagccttgagggaagggaggaagtgagctatgcagagatctgagggaaaagcagagagaacagaagaaggctagcatggctaaaccagagtgtgggaggagaggaaatgtaaaaggagaggaggtcagagggagccaggggcctttcaggcttttggaagactttgctttcctctcagtgaaatgagaagccagtggtgggctttgagaagaggagggattggatctgacatatatttatgttgtgttgaaaatagactctagggaggaaaggcaggtgccggagacaaataaggaagctactgcaatcatctaggcatgagtttgtggtggctgggaccagggagagagcagtgcaaagtggggcaaagtggcgagattcagtatctagttcaaaggtagagccagcagaactgacgtggtggatgtggtgggtaggagaaaaaggagaagtccagaatgattccagagatgcacccttgagtaactggaaggaaagcacttgtcatttcttgaaatagagaagacaggggcaggagcgagtttagagggggtgggccaggaggaaatcaggagctcagtttggagtatgctaggttagagatgtctattaatcatctgagagttgactgtccaaatttcaagggagaggacagggctggtcatatccatttgggaatcatcagcatatacagatgatatttaaagccacgataccagacaagtgagtacagatagagaatccaaggattgagctctggagtcctccaacatttggaggtcggaagggggaagaggatccaacaaaggctactgaaaaggaacagctggtgaggtaggaagaaaccagtagagaagtgacatgtgtccggaagagagtgttcaactgttagatgctgctgacagattaagtaagaggggctggaaaggtgaccactggatttaataatgtcattggtgaccttgagttgtttcagaggaatggtggcatgaatcgctagctagctggctgactggatggatggatggatggatggatggatggatggatggatggatggatggacagatggatggaaggctaacttaactactgcagctaacttaactactgcaggtaactgcaccatcttgtcacctgtgacagcaattaagcaactgttgcctgacactccgtgtgccagaaccaaaagctgtcaaaaccaatctccttctccattcacccaactttttggatccagcccagaaatcctggtgtgacctgtgtttgctataagatgagaatcttgacatcttctggtttgattatccttctctggattacccataatgctcttggtcgaatgtttccccttttaaggtttgagaagggaaaggaaaggaagaaaatgagaggaaaaaaaactaactctgggatcctagacttacttggttttgtatttccatttgccaaactgatgctttgccaaatctcccttcctttctggaagagcagatttgcgcagccacctacctctgcaagtgggggtccctggagattcctccatgttaaagccaaatgaggaaaggtctcagatatatctgtaaatttgtggccaggtgcggtggctcacacctgtaatcccagcactttgggaggctgaggcaagcagatcacctgagattgggagttcaagaccagcctgaccaacatggagaaaccccgtctctactaaaaatacaaaattatcccggcatgatggtgcatgcctgtaatcccggctactcaggaggctgaggcaggagaatcacttgaacccgggaggcagaggttgcagtgggccgagatcatgccattgcactccatcctgggcaacaagagtgaaactctgtctcaaaaaaaaaaaaaaaaaaaaaaaattgtaagacattttatgtaaatgttatttatctttttatgggtttatttggttgttgttatcatttattgggtgagcatggaagctgaactcttgtcttccctgccttgcattgtccttaatttattaaaaaaaaaaaaaaagaaaaaagaaaaaaaaactattttcaatgaagccatttcttccttctcctaatagtgaaaatcactggattcttaggaggcatgaggcacagaccaggcttcctacgcaggatgtgctggggtctgctccaggctcctgagagccaatagttacattttcaggaatgttataagcctcatactggtggcttaaaattgatgatgagagtacgtacaccatggaaactggcaatgactacaaatcagggctccttcgcccaaccctccacagttgattgttaaacacttgccagtacaccactgcctgttgccttcactatcaagaaagaggttttctgagatcaatctgaagtgtgacctcgggaatttcctgctttcctggaagggggtagatttcagcccaggcatgactgccacatcaacagagatgctcgggaagatgtgttgccctgcaaactttcacagttgacaccccctgcttcaagctctgtgtgatgacagtgaagtgagagtgagccgctcctctgaatggagagattaaaagcagttgtttgactgaggcaaggaggaagaagaaagcccagacaagccaagtgggactgtgatcttaacagatgttaggatcttacctcattagggcacctcagaggcttgccgcggaggtgagaaacaatagatgaggtgatggctttatggaattgtcagtgttatcagttccctgtcctcaatctgatctgcacaatcacagcctctgttgtcacctgtccaatttccaatcttgtggtagctgcgtttattacatgcgcaaatgcagccagcagccagaatgacattagcgatagtagctgctgtgggctcattattatgcaagccaggaaaggaactctaggcaggtgattaaacatgcctttggcaacagagcaaagaacagatgcttgggaggacacaccttgaaattgcaggtaggaacctgggtttaggaccatcactcctgtgcaggtctttgcaggggaagcagacacagcgttgtgtagtagttaagtggagggagtggggtctggagctggactgcctggattcaagtctcactctgccccttaccagctctgtgaccttgagtatgcttcccaccttctctgtttacattagtctgcccatctctaaaataggataatgatgctaatgatagtaccaaaaattggtatgcttttgaggatccatgagtaatctacgtaaaacacttaaagtgatgcctgtcacacagagctaataaatgttagctgttattattctccctccagacctttttgtagataggcatgtctagatttggggaagtcttgtcttaccacttagaatactgcaaagtcatctactttgacatgaactaaagaaagtaagaaagcctttgggcaagttgaaaccaacttgtattagtcagacatttttgagtttcaggtgacagaaattcaacccaaactgtcttaagccaaatatatacatacatgtagagatgcaaaagctactggttctggtgattcaaaataccagggttgatcttccagtcatggctggttccagggacttgaaaatgccagtgtggatccttcaggcatgactggctccaggagctcaaggggtgttccccgcactctctcggactctcttggactctcttctcaccaccaatctcgtggctctgtctcccgttactccctttgtgtattggccccattgtcttctactgaagacaccatcctccatatggctggggaagatgacctcaaacatcatccttattgctaaggatcgccaagagaaaacatattttctagaagttccagaaaaagtctgattggttcacctttggttacatgcatatttctgatccaatcacaatggccatggggatagggtgcatgatagacatgcatcatgggccaatccctgagctgaaagataggcatatggggtcagctctgcccaacccaacccaggagttggggaaggggaggttctccaaaggtggagtgtgaaatagacacacaacacagggtcaccacaagtccttggtcacggcaaagactccgaaagcctgtgacagcttgggttcaagtcctggctcctcccttattagtttggtcacctaggacaaggttctttctcctctctgtgcttcagtcttctcatccataacatgtgtgtaataatagtgcctactgcgtgagcctgttgggggcaaaatgagtgaatatgtgcaatctgcttagaacggtacagtgcttgatagttatggaataaatgatcagtaaaggctgttgttatctgatattcacaattatcatgaatatcttacaaatactttcattaattccacaaataaatttcatgtcttttatataccaggctggctcccagtgtctcgatggaccctacggcacattgggagagacagacatccagcaaatgatgactcaatgattgtggattggatttcttgtacaaagtggcaaagtggaaagacgagaaggcttgcatttaaagtcagaccaagaacctgcagacatggttaaaattccagctctccgacatattggctgtgtgacagagggcacatcacttcctctctctcagtcttaactttctaccctctaaaattgaatgataattgctggtggattctgactccagctgcttaatgcctgaaggccacttatcaccccacaacctatcactgatgcataggaccagaacagggcttctcaacttcaaccttgttggcatttggagttaaacattaacagttctttgggggggtggctgtcctgtgcattgtaggatgttgagcaacttccctgccctctacacactagatactcccagtgtgacaaccaaaaatgtctccagacattgccatatgtctcaactgggtaccaaaatcccccctacccatccccacttgagaaccaccaaaggaattcctctgattaactgtgctgggcatcccctcttctgggcctcagtttccccatctgtcaaatgaatggcttagcccagaagatggatagctattggcctccccaaagcagagttttccccaactctaaattttgtggtgaaaacccaccaagttctaagaacaggcttgggacaaggaggagaaaggacattcggccctcagctggagggaggcagagccctgcagatgcccatctcaggtccaccttttgcggcctcttgtctggctctaggccctctcccttgccagtttcctgttggccaccatgttttcccagttgctctgggaacacgtttccttcccacatcccactgggaataggaaagtccattgaatattcatgaacgtataaaatgaatttgtggttgatatcgatctagttcctgaggcctaagctggcctcatcttccccaagtggcctctcagccctggcttcatgtttctaagggaacttgtcctggttttcttgaaaggtaatcttcttgcggatcaactttgctaagaaaatgaaaagctttttcctctccctttaaatccctgctcgtatctgccaagagcaggaagagtccctgccagagccttgggattgcattgggcatttgagctctggagtcaggaaggtctctgttcaaataccagctgcgtcggtccctgagtgctgaccttgtgctggtcacctggttcctggagcctcggttcctcatctgtgtaacaactaatggagtaaatagagtaatgggaattcaccatctcgtgaggtggtttctagcattaaataaattaatataagtgaagcacacagcatattcctaacaaatactcaatatgtaatagatattctagttttgttattaatgattacatatatgatgattgagaagtcaaatgagattattatagccagtgctttgtaaactgctcagtgctacgtacaggagtaaatagttctaagatgttatcaacattattagcatcactttgccagccagccaaagcaaaacggccctgggtgatctgtcaatatcacaatccagcagtatcagatgctgtttggctctgatttcaggatcagaaatggcctacgaatagactcgttggctcagattgacttaaagcttcattctgaaaaatctacaccacagatttgggcccagggaattacccctagtggagaccaactgggctccagaatgaaggcttcgaatacaatttgaattgtgtgactatgcgagaatgtagaccgtcccccacagcatggacatgcctaagacacagtcgggttcaatcttgtcatcatggaggtagtgaccaccatcgaatggtccccaaatatgagctaccatgttaagtacattttgtgcattatctcattaatcctcacaacaacgtcataagggggctatgaccaactccttgttatgaacaaggaaaagaaggctcacaaagattgaattcaagtcaagaatctcaaggcaaataacagtggagctgaacttctgggcttctcagacacatgctcactgtagaccacatcatcggcacaggagatgaaggtctgatttggctttaggatgaggttctgtcgtatgcatgaaggatgcagggactggagggaggagagttatgtgtgaaaagggagctgccccatcaaattctgagctgatgataatggcaactatactagcaaccatgccagactctggactaaatgctttaggtacattatcccacacggtgcctgcaataaccctctgagacagtctgtggatacccagtttgtagatgataaagctgcagtctgcaggaccccaggggattgcccgaggaaaagtatgtagtaattagtggagctaggatttgcacctcagcagtctgattccagagttactctaggtaccgcagtggcttaataaactaccccaaactgagtataaaacactaatttgaacatgctcatgggttttgtgggtcagggaattagacaaggctgggatagcttgtttctgttccatgatgttcagggcctcatctgggaggaatcaaatggttgggggtgactcaaatagctgggcaccggacccagaggctcctgctgggctggaagttcctcttccaagatgatgacttcactcgtctaaataagtgggctgttgacccaaaggctgggctcagctgggactgccaactggactgcctgcttgtggcttctccctgtgacctggacttcttagagcatagatttgtgcattccaggagagagctttccaagggaaccaaccagaaactgcaggcctttgatgacctgaccttggaagtcacatggcatcacatctgctgtcctatactggtcagagtagacacatgcctgtcccagtggaatatgatttataccagttgctaggctcgtgctgagggttgagcagcagcaagataactctttgccggtgaatagcctccagttaacatggggaaaacaatgaggtaagaaaacgaatgacagtccagcatgccttgtgctcctgaggcctctgtgaagtgctgtgggcacaggatccattcttggagcatgcggtaactgagctcacagccaaattgctctttcccaatatccagcaaagctgtgttcctggagttactcatggccagtgctccacagattgtgctcagtcaggttaggctgaacacccctgaaagtaaattctcgcatgataagcagggtgtttccagttggaccagaaaatccagcagggtgacaggtcagataatgtcccagcaaaccacttcccaacccttgtcaaaactggtaggtgcagaaacaggcagtaacaaatgccattggcatgtgaaatgccagcctggtggggtgaggaagagaagtggaaatcatttgaggctactaaggcacaagaaggactagagggcaggaaataaactttctgtgacccgtaccattggaactgtctgccatcttgccgaatcttccatttgttcatgtatctcttcatccgcaagtgtttatagaatactgattatgtgctaggcactgtcctcagccctgggaatacagtggtgagccaagcagagctggtccctgcctctaggaacttacagtctcatgtctgagattatttcagggcaccacatggtgggttcaggtacaggttctggtgtcaaatcacctggaatcaagtttctgctcgaccacttcccagccagaagacctcatatgaaccattttgaatcgatttgctccctctgaacttgtttctgcatccttatactggggataagattactattttctgtgtatggttgtttaaatgagatttggattcacaaatgtaggtgctgctggctatggtggtggcagctttctcttctcttctgaactcactgtaagctcctccggggaaaggcctgttctctactcctcctgtgtgtctctcaggtccactctaagctgcctctgaagctggtactctgtaaatacctgttgagtccttagggctactgaattctgattcagtagctctggcgtgggacctgggattctgccttgctagcgagtcccaggtaagacccatgctgctggtctggggatcacactgtgagtagccagagactggctcatcctctcgccttgccctacagtttttcataactgaacaggaagtgttgttatctcatgcaaattcagggttgttagagcgtgagctcagcatgcactcagctaaacttcagagattccaaacaaacttttttccctcctagaagaagctgaagttttgctagatatgctttagccaggactattttaaatgactcagcggcagtaacattgaagcttcagccctaaagactcttccatgtgttagcttctcacctggggcaagttgtttaatctctcttggcctcggtttccttgtctgtagtagggggactggtccatttgggggctgtgaaatgatgcgtggaaatcaccctgctcgaggtcaggcatatggttggttttgataaaggagggcttctgttatagacctggtatttcccatcagtccagatcttcagatgctggagtgaaagaatcagtgctaagggaagtgctggctctgaggaaccaagggaaggttaaagcatcacttacagctcctcccttcttctccctgcacgtggagggctagacggaatgcttgcaaaactaaaagcaattatagcacagttttaaaagttcattggcatttatggagcatctagaaacttccagatgctgttctaagacctttccatggattatttcatttaagtctcataataacccctgtaaagtagggactgacatcatcctccttagacagatgaggacaccaaggtgtggaaaggtgaagagatttgtcaaagttcatttgaggaataaatagggagctagaagtcaaattcagacatctctctccagagctgctccttaaccactcatgggtaactcaaaaagtggttcttggccgggcacggtggctcatacctgtaatcccagcactttgggaggctgaggtgggtggatcacctgaggtcgggagttcgagaccagcctgaccaacatggagaaaccccatctctactaaaaatacaaaattagctgggcgtgatggcacatgcctgtaatcccagttactcaggaggctgaggcaggagaatcacttgaacccaggaggcggaggttgcggtgagccaagatcactccattgccctccagcctgggcaagaaaagcgaaactccatctcaaaagaaagaaagaaagaaagaaagagagagagagagagagagagagaaagaaagaaagaaaagaaagaaagaaagaaagaaagaaagaaagaaagaaagaaagaaagaaagaaagaaagaaagaaagaaaagcggttcttgagctcttctgttgcagggtgcaggctttcttaggactggatggaagtggtggcctctgtcccacctttttcaaaggtgagaccctgggtcacagccaaagggagcattatcttcacacgctcctcccatcctccatcatccctcacctcccgcctacccaatcaaatcaagcagaacttattagaataatgtacctgcacacaatattggatctaatttcaagagattcaagggctctccctccctatcaaagccagcccatccccatcacatggacacaggcaagaccttccaggcaagaatcagacagggggcctacctttgccttaaccctgaactataatctgaaacttgcatgccacttatttgaatgttacctacttgggaatctcttgttttctttaaatcatcaaacaccccttacggtttgggataggaagctctattgtatcctttaggtctcccagcctcagtctgttttacagaagagagaggcaggcaagaaagaatagggtacaggaatggggtccttatatctgtatgtgtcttcttaggtgcccacaaaatcccagtaagggagacaatattttccccatttcacagatgaagaaactgaggctgagagaaactacatcactcatctagggtctcacagcctataaataagaagttcaggccgggcgcgggggctcacacctgtaatcccagcactttgggaggccgaggcgggtgggtcacgaggccgggtgatcgagaccatcctggccaacatggtggaaccccgtctctactaaaaatacaaaaattagctgggtgtggtggcgggcacctgtagtcccagctactcgggaggctgaggcaggagaatcgcttgaacccgggaggcagaggttgcagtgaacccagatcacaccactgcactccagcctggcaacagagcgagactccatctcaagaaaaaagaagttcaaaggacattgacaccaaaaacatcattttctaccgtgccactgaattaaagaataaaatcagtgtttaagactatgcatataacagaagcataggttgtgtggctttggtgtgaatatatgtactcttaagttctccatattaaggacgttcattgctagagtcttagaagtccagggctgggtgcattttcgaaggtcgtttagagcagagcttctcaaacttcatgtgcatggaaatcacatgaggagcttgttaattttaatgcaaatcaattctgattcagtagctctgacgtgggatctgggattctgccttgctagcaagtcccaggtaagacccatgctgctggtctggggatcacactgtgaatagccagaggctggcccatcctctcgccttcccccacacagtttttcataactgagcaggaagtgttgttatctcagagccatcaaagaagaaatacatttctcagcgacagcgatggcggaggaagaggcctgccaacaggcggggagcagaggggaccttagaccctggcagagatcgagcatcacggaacacgtatcgtaatgctgtgctcaccgagggagtccaccagggaaaggaggacactattgttcacgggaaaatgcctgggagggagctattatccgtcggtatcaagcagttagagaagtcttctccgaaaaacactttaacaagaaatcaagaatcaacaaaaataacattacctccaggttctccttcattaacctggaaatggggatataatcaccactttcttgcttgtattaaccaggagtccagcctggggaaggtggctcgcccccatccttctttcgtggcccagctccccctagccactcctacgtccttgcctgctccccaaatctcccagctccttctgcctgctgaacattgcagctgccaagcctgctgagaacatccttcccccttctctccacctattgaactcctcctatcatttggggttcccctaagtgtccccacttccccaggaaaatatctctgattcctccaacatatgtcaggtctgcctgtagactctgacactgcaccctttatttcctttttttattttgtttgtttgtttttgtagaaatggggtctcactatgttgcccaggctggtcttgaactcctaggttcaagcgatcctcccacctcagcctcccaaagtgctattattacaggagtgagccaccgtgcctggccttattttccttcatagaatcaattaagcagtaccgtgtaagcaagtcccaggtaagacccatgtactttctgacttgtcccatccccgttgtaggtatcatgtctctttccttcactgctcagcatcttgtcctagtaggtgctctacaatcctcttgcaaagcccagcctcccttagccattctttgtaacactcgtcactacctgaaataaatctatcgatacagatgaatatatgactacaggtttctcaacttcagatccatgatgtacatagccaggtcattctttgtcatgggtactgtcctgtgccctgtaggatgtttagcaacattccttacctctatccattagatgccagtaacaccccccgccccaccccacaacacctgcaaatgtggcaagccataaagtctccagatattcccaaatgccttatggggtacaaaattgctcccagttaagaatcactgaaaaaaatacacctgtgtaggccagacacagtggttcatgcctgtaatcccagcgctttgggaggatgaggtgggaagaccacttgaggccaggagttcgggaccggcctgggcaacacagccataccacatcactacaaaaagattaaaaaatcagctgggcatggtgacatgcacccgtagccctagctactcagaaggctgatgtgggaggatcacttgagcccaggagttcaaggttacagtgagctgtgattgtgccactgtactccagcctggatgaacgcatgaggccttgtctctatacacacacacatacacacacacacacacacacacacacagagagagacagagagagagagacagagacatataaacacgcatatggccaggcgtggtggctcacgcctgtaatcccagcactttgggaagctgaggcaggcggatcacctgaggtcaggagtttgagaccactctgaccaacatggagaaaccctgtctctactaaaaatacaaaattagccaggagtggtggcgcatgcatgtaatcccagctactccggaggctgaggcgggagaatcgcttgaacccaggaggcagaggttgccatgagccaagatcgtgccgttatactccagcctgggcaacaagagcaaaactccatctcaaaaaaataaaaataaacatgcatatgtctttacatgtatacctgtatatgtacacttacacacacgtgtgtatgtgtctgagtgtttatttagtcgttaagagctccataggacaggcagtttcttttgtttgttgctgtgtttccagcacttcaaaaccatgcctggttcctagtaggttctcataaatacttgtgaaatgaataaataagtgatccatccccccacctacccccacgagtgtggttgtgaggattaaatgggattatttacttattcatttatttgttgcacttagcatagtgcttggtattggcagacgatcaataaatgctaatgcccctttcctcctctgttttcccatttccttcctgcttccccttaactgccaaagacctgttttattattttaccccctgtgaacctcatgtttcaaaagattttttttcctaaactgattaaataattatttattcttttctccctgtgcaatgaagcaaagacatggctagctgtgcagtagcattgccgtgaagaacttgaggctcctttcggcatgagtgccatgttcccagatgtggcatgggctgccgctgagatcccagaaatgcttatgatgttactgacaacccattaggcctctgattggtgtcagcaagctaggggtaccactgagctgatggaattccagccccaaacaaacttgacatttctagtttgtctgcctacgcagggttatcaggagtaaaataattatttcagttaaacatttttttagtgtctaggaaaaaacatgcaaccttccctgcaattttccacccccaagactaccacgaggagccccagtttgggaaccatcaacccgtcgtggtagttttttttttttttttgcggtcgtgctcccagggaaccggagaagggatttttcaggacgcagctacttgatcacttttttccttgctctcggtaatgagctttcgggcctaattagaatgaaatgtgttgtttcccttccttctttctctgtctccataatgatctttatcattaggatggattaatttctcatgcccccctctctctctcgttatgtttcattgtggtgtgtttgctgtgtggatggggatcgttaagggaacctcactagcactgtgaataaataaaagaaagagaaggaaaagtgacaaggaatgaaaatggcaccaaatgagcctcttgctgacagcctctctcggtgataatggagaacagggaagcgccatgcagcaccatttgtccttcctcattgccactgctttaatgagaaagggaaatcaagcaatcgggacattcctgtcatcctccagcccgggcagctctattgtgaagtccacagtgagcgtgcctcgccggagcggtgctttcagaggctcccaggcacagaggcctctgcccagcccggcctccttcctctctcatcagtctcccagcatatggacattctcccctcacctgctttttcttccagtatgtcagctggcccaaggctggggtgtccccactccttccagggtcgtcttgtgcactggagtctcttcaaagggcttcaggaaagagagaggaagcgagggacccacgaggtcaggtaggaggctccaatcagccctctacgtgcatttatcttcaaagctctttccagctgctaaagaatgaatccctttcaatacacacactggaagggggccacttcgaccagattttacccctcaaatatagctttttgcgtgactattaattaattcacgcaaatatagctttttgcgtgaattaattaattcagtcttccaggaaaatgaccaccccctctgagccctaccctggaaatccgtgttgtgatagagagagagtgatgtatcagttaggataggatcacttatgccgccgtgacaaatgaccccaacatctcaatagctttcaacagcaaggatttatttctcactcatactacattatccagtgcagctcaatggtggctctgctcggtgtcatctccccgccaggacccaggctgatcagaagcctatatctaggacattgctggagtaaagagaaaataagtcaaatcacgcacagactctatacagaggtgtccaatcttttggctcccctaggccacattggaagaagaattgtctttggccacacataaaatatactaacaataatgatagctaatgagtttttaaaaatcgcaaaaacatctcatagtgttttaagaaagtttacgaatttgtgttgggctgcattcagagccattccgggccgcatgcagcctgcgggccatgggttagacaagcttgcaaaagcttctgctcaaaggttacacacaccaattctgttctcatttcattgaccagaaaatgtcacaagcccacatctgccattgatgggagaaaagtattattgtcccccaggaaggagcagaaaatatctctgagaaatagcaatctaccacaatgggcttggagtttataattattaacaaataagagaacaaaaagacctaggaattataaatatatactaatatagtcacctaatggaaagtataaagcagtaaaatggatgcactatagccatataaagcatgggtgcatcttggaaatataatattgagtgaaactccttgtacccaaatccttgtctcaggctctgctttgcagggggagcacaaactgaggcagcttctgtgtctggtgcttgtccagagtgtacttagcactcactgtctcctaggacagaattcccccttggggtacagctctaattctggaaaagtctgcccctgcctacccttccttccttaattcctgtccagctttctcttggcaaactacagcccacaggccaaatccagcccaccaaccaagaatgtttgtacacttttaaatggttgaaaaaaatcagaagaatgtttcacgatgtgaaatttatacaaaattcaaactgcagtgtccataaataaaatgttactggatcacagccttgcccatgtatttatgagcagttgggacagagaccattgaaaatatttacttcctggccctttgcagaaaaagcctgtcttacatgacaaaatatggcaactagcagactgtgtcgggtagtatcatcagtgaaaagaagtacctcgtacgctcgagccaaacatcagcctcttgaagagttacaatgggctttttatgtcgtcaacctgcagaacacaggaagagttagggagaagcctagacccaggtcagaatgcagttggagatgattcgggaagcttaccacagggaccctgagggggcttcccagaacttgctgaacagtcgcctttcccttccctgctctgcgagtttgggttttgggtaagcaagtcaagcctggtcagctggaatgctctggctggtcaaggcaattgaaatttctctttaatggaagattgaacaaaaagctctttctggattgcccctggggagaggtttctcagctgtgtgcaaagcccattttcctgatgggaaatctctccactgcccgagaatggcacgcagacccagaatctcccgggcaccagtccccaccagtgggacatcgtcccgctgcaaaaagtataggacaaagaaactgaatctgtcaaacctgtgacatcccctaaaagctgaacatttttaaaattcctgatagcaaatttaaatcttttttttttcctttctgcccgccttttaaaaagatagagaaggttatttttaaaggcaggccatagatcaggattctgaatgacgggcgtgaatcagagtcctcttgtgggctttctcagtatacagacttccgggccccacggcggatccactgatgaatctcagaatgggacccaaagatctgtatttttttttaatctagagctggggtcttgccgtgttgcccaggcaggtctcaaactcctacgctcaagtaatcctcccaccttagcctcccaaagtgctgggattacaggtatgagccactgtgcccagccaggaatctggactttttttttttttttttttttttgaagcagtctcgctctgtcgcccaggctggagtgcagtagccggatctcagctcactgcaagctctgcctcccgggttcacgccattctcctgcctcagcctccagagtagctgggactacaggcacccgtcaccacgcccggctaacttttttgtatttttagtagagatggagtttcaccgtgttagccaggatggtctcgatctcctgacctcgtgatccacccgcctcggcctcccaaagtgctgggattacaggtgtgagccaccgcgcctggcaggaatctgtatttctaaaaatttattgtttccataggtttttggggaacgggcggtgtctggttacatgagtacgttctttagtggtgatttgtgagattttggtgcacccatcaccatagcagtatacgctgaacccaatttgtagtcttttatccctcacccccttcccaccctttaccctgagtccccagagtccattgtatcattcttatgcctttgcgtcctcatagcttagctcccacttatgagtgagaacatacaatgtttgggtttccattcctgagttacttcacttagaataatagtctccaatcccatccaggttgctgcgaatgccattaactttcctttttatggctgagtagtaaggaatctgtattttaacaagcttcccagcacttcccatgtgtgtgctgggctaaagcagttaaagaccactgctttaacactgtatttatttacatgggaaaatgtccatggaataccgttgaattgttttttctaaaagcaagttagcctgtgtcatgctgatttctggaaaattctatgtcattatgtttctttaggagagaagaaaagccaaaaaagtattaacgggggtagtgggattttacaggtgatttatactttttttttctttgtactttctccaacttgtttgaattttatgcaatgaatagctatttcttctaaaatgaaaaagaaatctctgaagttatttccatggttgggggtgggatggggcagtaagacgtgtccatgagcctccgttagtcggctctgattatgtgaggcttcttggtgtcagggagtcttacatctggccctgcctgttgctatgacccagaagctactggaaggtgtcaggaaagttcaacatgcccccgtccctacctcctgcctctggcctctggtgtggtgcagacccctgaagtaaatgcctcctcaaggcagcaggcagagcccagatgggatggtgaccctgccgtcatctgtgctcccattcctggcccaaatggagtctcaaggtctctagggagcccagcccagcacctgccacaaacactaaattctctcagaactccaggaagaaaacactcctggcagaagagagttcagtccctgccccggggctcgcctccagccatctctgatgacccaggtcccaagatgccctcctgtgccttcattatgggaagagaggcatctgtctttcagaggcatctctctctctttttccctctctctctcctttttccccctcccccctgctgtctctctttctctctgtatcctacaatccctggatcatctgaaggcctgtaatctcaggcttgtttccccccagacaccaccatggagcttctccctcccctgacagcccatgggagcccaccccacaggtttttctacaaggtctgcaaaggacagagtggaagggaaagtgctagaaggttgcagagacaccccagaaggtgtctccagagcaagctttcgaatgacctctgtctgcatcactgcccaccacccctgcccatggctcagggttcataggggtgtgtgttcatgtcctcagacttgggcaggtgagcccaggacacttgtgccacggggctgtgggggcctcctgcaggctccggtggcctgggcccaggcaaaccagcccactcatcttgtatctccaatacctacacacacacacacaaaagcttccagaagaaaggaaaaaaggaatggacagaggaaggaccagtctcctaagattattcctcattcatgcagtcctccacaaatatttacaagcacctactacgtagcaggcacaattctaggtgctaggatagagtgaacagaattagactgattagactggtccctactgtcataaggctgatgatctacaggaggaagtcaaataatcatttttaaaaggaaaatagaggccagtgtggtggctcatgcctgtaatcccagcactttgggaggccgaggcaggtggatcatgaggtcaggagttcgagaccaaccagaccaacatggtgaaaccctgtctctactaaaaatgcgaaatgtagctgggcgtggtggctcgtgcctgtaatcccagccacttgggaggctgaggcagaagaatctctggagcccaggaggcagaggtttcagtgagcagagatcgcaccattgcactccagcctgggcaacagagcgagactttgtttcaaaaaaaaagaaaaagaaaatagaaatggcccctgggagaggagctccacaggagaggcagatggccctttgacctgctcagagaagtaggtcacgggggcttctccagggagcaaagcccttgctgatgctgaaagatgagtgagaggaagagcgctcgctgagacccccatcttcccttcctccacaccctaaccttgactgatggccccctcgcctttactgctactgctctccctacaggctggggaaggagagaattggaaaatctccttctgaccatattgtgtctggagttttgtatcacccttggtctcagaccctgaggccagaaagccacaaagggtcagaggtcagagtgggcagaatcaatctgtgcccgcttcagcctatgtttaaggtacaaggatcatttgaaaagtccctttcacaagggaggcaccctctgaacataaaagtcttgccccagctcaggagcagacagacttgcttactgggacgtctcaaaacttgtgcaaatgacaagttcatttttagccgaaaagaagacacatctgaaatattgatgtggcagccggagcccggctccagacccagctacaaagggaggtgctagttgatgaagagtataattaatcagcacttagggacctctggctgctgatttcaagctaactgtcccccaaatccacttctctgacccaccagagcccagggtgctgccactcaaagcatcacagtacgtgaatctaattgcaaacctcctgcctgccatcacgcccatctcccctgcccagctctgccaccatctcccctccctagctcacccccatctcccccgctccagcctacagtttctgccgcagcctcgcctgcctgacccgacagatggctcctcctgcatcctccatccctgctttgccatttgctgttccttctcctccttcagcacctggctcactaactcccgctttataactcactcccaatcagctgtgcaatcccagaaaaatttctgaatcactttgtgcctcagtttccccatttacagaaatggggaaatggtaacagtcctcactgtgttagggtccctgggaagactgaatgtgttagggacgtcaagggtgtagagtgcctcatggcacgtgacacttgccctgcaggcgttaactgtcgatgtggcacatctttccagctcatctcaagcatcacctcctcctggagccttcccggcctctcagtctgagttagggtcacttaattgctgattcgcagtccttgctagactctaagcttcttgaacccgagaatggcatcattcatctctgcattcccagtgcctggaattgggtacacagtaggtgctgagtaagtgaatggatgaatgaatgaatgaatgaatctccttgcagatttctccagggtctgagattctgtgctatcacaccaaggacggggaaatcaattcaaaatcttctgcatctttaatttgggctgaagagtgcagctctctcctccctgctccagggaggtaggtttgccggtccagccagcctcatgactcagctgccccagaggcttctctctgccccagggcatacttagccatttggcacagaaggcaccaagtctagggccatgaatattatgatgcagcctgctctgcccagcagcactcaaggctgagttttggaaagcgagccttgtggtgactgagtaggaagtgcctataactggcccctccctggctttgccctttgtcctcccactacctggctggtggccattcccatcatttatgcctttttcccccaacgtggggcaatggccagccccagaatctcagctgcagccatgggggctgtctttggcttttcccagccctggttcccctggctctcccctgccgtggcttgcatgctgggcacacactgcaggatctgggcaactctgccagccaggaaacgcagaccgcccttgattagcataagcaacgtgctttccttggctgagtctggagctgtcgcagcctaattagcaaagccgccagatcagcaggccctctcattaacagcggcccaatcccacccatgtctcagcagcccaagcctccacagcccatccctcagcagccttcccctgggatcacatcaggggtctgggagtgaaggggacagccaagaagagccaggccatgaccttgtcatcagctgatgcgtaacccagcaaggaactcatcttccgggagggtggaatttgggctaggggcctctgaaagttcattgcaggccttgtgtcccaagtcttttcagccccttcatcatagagtgaccctgtgctaagttctgcaaaagataatcatgcaggccgtgatccctggcagcagaaagctccgtcctctccctggttcaagccaccatgttctctgccctggactcctcactggtctccccaaggtgtatagttaggtcagttcagggtacccgaggacagagaataaaagcaaacaaagtgaggaagaggggaggctgctttcatttaagtagtcaggagggcttctcagaggaggtgacactttagctgagacttggatgacaagaaaaagttggccaggcaacaatctgaagtaaagatattccaggacaaaggtcagtaagtacaaatgaaaaagacgcctttttttttttttttttttttttttttttttggacacagattcttgctctgttgctaggctggagtggaatggtgcaatctctgctcactgcaacctctgcttcccgggttcaagcgattctcctgcctcagcctcccgagtagctgggactacaggcacacaccaccacgcccaactaatttctgtatttttagtagagacagggtttcaccatgttggccaggatggtctcaatctcttgacctcgtgatccgcctgcctcggcctcccaaagcactgggattacaggcgtgagccactgcgcccagccaaaaaagatgcctttttaaaagacgatgaaggaggccaggagcagtggcttgatttgtaatatcagttcgggtttcacacttttcaagctttgctctttcacccttcaggagatgtgtgtgtgctagccagacaaatgggacttttttggttaaattggctggaattggtttctgttgcttgcaactaatagctctaactggtaccctgtccttatgactcatcagtagagaatggatctctgctggtggggagcaggctgcggctgtatcaggcaaatccagggcagcctcaaaactcccagcagtgggacagaaagcccatcttttctagggccaagagaggaactttggaagacactcctgagtgagaatgctccactccctgctgccctaccccatgacagtttcttgtgatctgttgtgatctgggttctagagagggaagagcaagaatgtaacattcttgtaagctataaaatcagttgcaaaaaggaagatttggggtgcaaagagacctgggtttagattctgactcttccacttactagcactcacttaaactctctgggcctcagtttcttcatctgtaaaatggggagagtagcaatttaaatgttttcatctgtaagtactaaacacccaagcccagctggcataaaaaaacaaaggtgtttattaggtcaaggaactgtacttgcagatgtaggttgacctaatcacggctctatctcctttcttggtgattcttttggctctgccctcttctgggtgtcagcttcatcctcaggctgaagttctgaacattatacttgttcacagtgatatcaaagaaagggaaggagttgcataagccagagtcccaggaagaacttctccagcagctcagagcaaaccactccacccattggtgcaaattgggtcacatgcccatgccccaaccaattgctgtcaccaagagaatgacacatgctgattggcctaggtctgaactcctgaaccaatcactggcaaggattatgggattatcatgattggcttaaaccagcagttctcagacttttgttcccagaacccctttactcttgtaaaaattagagaggaccccaataagctttggtttatgtgaattatatttatcaatacttaacattttagaaattaaaatgtaaaagattaaatatttattcatctttaaaataacaatagtaagcccgttatacatgttactataaataacatattttatgaataataatgatactttccaaagcaaaaaaaaaatagtgaaaagagtggcatgcttttacacttttgcaaatcccttgaaagtctggcttcacagaaaatggcaggattctcagacctgcttctgcaatctggccgttgtgatatgttatcttggtttgtagcatatgaagaaaatccagccttctgcagatgtgtggttggaagaagctgggactcacagacctcctgaaaggctctcaggaccccagcagacctcactcagaaccgcttgctgaaactaaccggggctcactcaggagctgtctgggatcagactctgtgaactccatggcagctacagttcaggaagggatgcgcagctatggaggaaacacccatggtatccagtacaaggataataattgcttccacttcatagggtttttgaaagaactaagtgaaatgatggatataagcacctaacactgggctcaataaatggtacccgggggtgagaaaggaccacaggtgagcacagttataagcgagaatccattatccagatgaaccaacttctcagctcctttccccaaggttccttccacccacgcacattccattatgccattcttgctacatcatttcactgaatgttcatctctggaagaaaagacataccataataagtgccacagaaaggagagcaggggcagtgttcaacagaggggaagatgaaacagaactgtcaaactctggaacactgagacggttctgctcctcagaagagcagaaatgtggtcctttctcaggagtggctgtgtggcaagagcgagatacagtcctggctccagaaggtcaaatcaaagcatctggtgtctacgtctggtcagcagataggggttggggtcaggaagctgaaaactggatgacatcaggaagtcagggcaggacaagagaaagcaaagggggccttggaaggagcaagcaatttcaggcccaaatcagcacctccagcttacagggaacatctggagccctcgcttgtacacacacatacacagggacacacacacagagtagggtaaggggtgcagggctggagggacagtgttactagtaagtggcatgatagactgtctgtgctgtggcacagcttacagaacagtcccaatttcaagactctaagagggcgggacttatcgccccagcacctagctcagtgcatagctcctagcacactctgtagctactggttgaatgaatggccctctaccttgtccctataaaccatcaaaatgtccctgaagtgccaatatgccagcaccccgattacctcttccagattgccccttgctcccaggactggcacaaaaagcctgtgaatgacaatgtatttggatttgggactcagctctgctgtggagatcaggagatgcaggttctagtcccatctctgcactagatcactatgtcattcaggacttgacatgttccctcttggagactcaagtctaccacctgtgagtcataagaaggggcccctgagcagatgtgttgaatgaagggctcagggacccaacaaccctgtaccaaggtcaggaagatggaatgttccgctaagtcaagttcactggcatgaccagaaaggcaagttgccaactgaggatgagggtgcctggagactttggggcatggccacacccagtgacgtgtcccctctgggccctcattacccttttgtagactgtcctcacctctcttcagcctctgacctgatatagggtaaaaccttttcccagggttttaagatagctgctgccgggacctgagacctgtgaacttgggtctgagccatgaacctgtcccaggttcaaactcctttttccagatgcgaaatttaggaggcaaagagaaagggaaggaatggttactgagcacctagaaatgccaagcctctgttagacattttgtctgcatatctgacttcctatccgtatggtagacatcaatgtcccaagaaagttgaaagaaaagtgcagtattctagccaagatcatgaggcccggatttaaatctttcctctcctgtccattcccctccccaggtcccacctccctagctccctcctccctctgtccaccactcctctctccttccctccctatgggttcctgtaaggcacccaagatgccactgccacctccgctccctcgggggatgtgagcaaccgtcttaagcactgtcctcatttcagtctcccttcgtaactctgcgtttttgctctgggcattcagagtggcaggttcctatcgccctctctcctctgccaatgaaagctggcgcataatcctgcttcctgcccaccccctccatcttctcaagtaatgtctgtcgtcccgcattcttcttcccgttccggccctgtggctgctttcaaagcagatccttgggactcaggccaagttcatcaggagggcctggaatggcccaggaggcagaacctggtgacctgtgtatcccagggctcaatgctgtctgctcaccccgatggctatgacatggggtttgtgaagatggggtagctgctgagagaagcgaacagcctcaaagaccccagggccaatgttctgattcccgctcagaactacttcttagggagccatcatcacctgcctggagccctgctttcaagctgccctgggagatgtcttgtgtttttcagatgcttgccaagagaggggtgagagccctggctgtgcagtcacctctgccaatttgcagagttgaagccagtcagtgcctccatttcaccatctgtaaaatgggcacaagagtggtaatgaccccatagggtcatcagaaggatcgtatgcctgtaaagagctatggttggccgggcgcagtggctcacacctgtaatcccagcactttgggaggccgaggcgggtggatcatgaggtcaggagatcgagaccattctggttaacacggtgaaactctgtctctactaaaaaatagaaaaaattagccaggtgtggtggcaggcacctgtagtcccaactactcgggaggctgaggcaggagaatggcaagaacccaggaggcagaggttgcagtgagccgagatcgcgccactgcactccagcctgggcgacagagcaagactccatctcaaaaaaaaaaaaaaagagctatgatctcacccacagaaaggacctagcaagtgggtgcagctactactgtggtcaccaggaggagagggatgctggcatggctggtccagggaatgaagtctccttacccagatccctgtgattccagggttggatatgatgcccacttgggtatgttgcataaactctctgtccgcacacttatttgtccaacaaataaatgagcatttactctgtgccaggcactgtcccaatggccatcatacagcggtaacaggacagagatggcccctgtcctcagggagcttactgtgtggtagggagagacatccgtgagcatttaacaaatgatctcagggaagcatcagtgctatgacaaaaactggtcggggacaactgggggaaggcttcagagaaggtgctggggaaggtcccctggagagctggcacctgacgtagacctgaatggcatctgtcggacggggaaagagctctccaggtagaaggtgcagcaggtgacaagtccccaaggtgggaagcagcttagcttagttacgggataacaagaagcccagtggagatgagtgagtgaaatcgaaaataagaaaggatggagtaggggtggtgggaggcaggggacagatgatgctgtttatgccacatccaggagttcagattttatccaccgagcaatgggaagccagtggaggaccccaggcaggggagtcacatggtctgagtgctgataagtctggctgttgggtggagaatgggcagggagtcagatgggggtggagaggccagcaggaggctgctgtgatcgtccaggggagagataatggcagctcagacgagggtggcagcagttgaggtggtgagaagccctggaattccagatactttttggaggtaaaacagacaggatttgctagcagatgggtccatccaggtcacatccccaaaacagccattgtgggagaagctcccggacagcctggcgtccaaggtcaaggttcaaagggttgttacatctctgcccccacagctgcctctctctggggcggccagggttccgcctctgtctttctcccagaagccaagggtcagatgctgatatatttggggaaatatacatgaaatacaacgaagctctcaggaggtggtcctgaagccacctctcttgagtgctgcaagggcctccagcagtggcaggcaatttctgctaataaaactggtaaaggcaacttatgcagatgtgtatgcagacacagagatggccaacccaccgggcacgttaaagacacaggcacctagcgaggtgggaggcccccaggagtcccgtgctaacacagttccgtgcacgcacttgaaaacgctgcttatgcaagggtgctgggagcagatgaggatttaagacatgctttgatggacataaatttatagactagaaaatccgaagttctgagaactgcaattttttttttttttttaagatggagtctcgctctgtcacccaggctggagtgcagtggctcgatctcggctcacagcaagctccgcctcccgggttcacgccattctcctgcctcagcttcctgagtagctgggactataggcacccgccaccacacccggctaatttttttgtatttttttagtagagacggggtttcaccgtgttagccaggatggtcttgatctcctgacctcgtgatccacctgcctcggcctcccaaagtgctagaattacaggcgtgagccaccgcgcccagccagaactgcaatttttttaaatcttccatggtgtttccaaggggaggctaatattcagctagagccagaaaaatacagttccttttaccagctttacagacattttggaaagtggcatcattaagtccatgtgaatacagcaaaagttctggtaccaaactcagtgagaggggtgggagctgccagggctgcccacccagaataaaaggtgtggacaggtggacaggtaggccctctgagcagtgaatgtcctgctttttgaggggagggaggatttagaaaattgaggcaattgtccttgtagacacatagtataaataatcttttgttcctccttcctttcctttttttttttttttaagatggagttttgctcttgtcacccaagctggagtgcatgtcatgatcttgggtcactgcaacctccacctcccaggttcaagcaattctcctgcctcagcctcctgaagtagctggaattacaggcacctgccaccacgcccagctaatttttgtatttttagtagagatggagtttcaccatgttggccaggctggtctcaaactcctgacctcaagtgatccacccgcctccacctcccacagtgctgggattacaggtgtgagccaccacacctggccgcctcttatttctgtggtggtctctctgatcacccacttaggatgccaagtatagggaaggcaagaaaaaaattgctgatagcgtctccatgcttgtaaacccaaacacaggacccaaactacgtttcaagaaagaggttgtgaagtggcccgctttgagcagtgtccctggggccggtcaagcctcagccacaagtgccaatttcactttcgtcccagcctttcaggtgggcacactggggccctggcagcagagcgggccatctgtgccacttccctctgtcctggggtactcttcctttagccagagggggcacactttgccattgggcactcagaggatccggggagagggctggacccctcctccttagtacatttgccagatgggcagaggaggccgagaatgtaaggccggggtctgctttgttgtttccttgtggctaaagatagggatgatgtgagaatctatttgctgtaatgaaagacaagctcaccacactctccaccatccctgggtacaggctttgcaaagagtggccttgctttaaaatcaattttaaaacataatagagaccacaatttaatttttaaagtcgcgatcccattaatctaaccttagtaggttacatgtattgaatgctaactctggcagatggtgttctaagtgcttttacatgtatttgctcacttaaccctataagggagcagcatgattgttccattttgcagaggagacaaataaagccccaggatgagaagcagactgcggaaggccagacagcgagggcagcattctgtcttaatctccccttgcttccagtgcctggcaccagcaggcagccagtgaatgtgtagaccaggggacgttcactggtcaacgggttggttagtcacctgattagctagttggcctagaggctcagtcttgagttagcagactcacgttccaacctcagctcagccacttcctagttgtatggcctgttatggaaattctttccttcccacgtgcctcaattttccttattcatgcaatgggtttaagaattgcctcacttgggaggcggagtttgcagtgagccgagatagcgccactgcagtccggcctgggcgaaagagcgagactccgtctcaaaagaaaaaaaaaaaaaaaaagaattgcctcactttgcagggtttggattgtgaattagaggagaccaacgcctataaaaatctggcacatggtagatgcctaataaatgcttgttgcaatgctgagttctagctgcaggtacagctttgctacccagttccaaacaagagacaccccagctgccacatggacgtcagcttgtaagatgcgggacgtccccctgtatgtgccactgcagatgtctgcacgcactccaggcagcagcacagacaggcccgtgcgccacatgtcagattcccgactagagaagccagtgctcaggtctcaccaccaggtacaaactgagtcatttcccacccatctggaataacggcatcttcctccatgtgccactggccccaaagcctgctcttctctgtggggcaggaaatgcactttggtgtttttgtttctgtttttgtttttgtttttttgagatggagtctcgctgtgtcacccaggctgggatgcagtggtgcgatctccactcactgcaagctccgccactcgggttcacaccattctcctgcctccgcctcccaagtagctggaactacaggcgctggccaccacacctggctaattttttgtatttttagtagagatggggtttcacggtgttagccaggatggtctcaatctcctgacctcgtgatccgcccacctcggcctcccaaagtgctgggattacaggcgtgagccaccatgcccagccttgtttttgtttttttgagacagagtctcgctccttcgcccaggctggagtgcagtggcgtgatcttggctccctgcaacctctgccttctgggttcaagcaattctcctgtctcagcctcctgagtagctgggactacaggcacacaccacatgcttggctaatgttttgtattttgagtagaaatggggtttcaccataatggccaggctggtctcaaactcctggcctcaagtgatctatctgcctgcttctgctgccaaagtgctggaataacaggcgtgatctactgcgcctggacaggaaatgctcttgggctagaaaaactcctgctggcttgtcttgctgccacctgcaaatgggacgcagtcacaaaggcctgcactggaaaaaggtcccccaggcctgcatctggcacatcctcccaaggtctcctaaccaaacagtaatgaggatgaaccaaatatttcatgcaaatagttcagtaaaaataatacagcacaggctgggtgcagtggctcacgcctataatcccagcactttgggaggctgaggagggcggatcacaaggtcaggagatcgagaccatcctggccaacatggtgaaaacccgtctctaccaaaaatacaaaaattagctgggcatggtggcacgtgcctgtaatcccggctactcgggaggctgaggcaggagaatggcgtgaacatgggaggggagcttgcagtgagccgagatggcaccactgcactccagcctgggcgagactgtgagactccgtctcaaaaataataataataataataataataataatgatacagcacaggccggacacggtggctcatgcctgtaatcacagcactttgggaggccaaggagggcggatcacgaggtcaggagatcgaggccatcctggccaacacggtgagaccccgtctctactaaaaatacaaaaattagctgggtatggtggcacatgcctgtaatcccagctactcgggaagctgaggcaggaaaatcacttgaacccggtaggcggggcttgcagtgagccaagatcatgccactgcactccaacctggccacagatcgagactccatctcaaaaaatatattataataataataataataataataataataataataataatacagcacatggatccagcctgtgaactccccagaggaacttggatgtgaacagcagacaatttcacagtccacatggttgccctcaaagtatgctaggtgttttctttctcgccctctcttgcctgaacagggtgacctttccaaaaatcacgtggagttgcttaaatgaatgttaaaactcattctcattccttgacttggtggcgggcatggaacaggagcttgctgggtcatgagaggaagttagcctgggaatcgagctgaggtgtggctgtgacttggggacgcagcctcatgcggagcgagttcactgtaaagtttattttactttctgccccataaaaagaaaatgtgtaaaaggggcacgttgatattttttcaatatcacaaaacatataaagggaattttttagaaaagcacaaatgatctgttgaaataagcaagttagtttcaggattaaaaaataacattgtttcaccaccttatctatggtcccatatttttctagagatcaagctggccatcctagatacttatcattgaggggaggtgggggaaaaaaaccacccccaggctacacagaagatgtgggtcaaattattcaatttggcgggccctctgatgaattctgttgggtccacacccgctccccgccttgttccctagggctgagatttacaaatgctgagatgagtacaaagaagcttttgcactggagcagtgttttgtccctgggggaagaatgacccccaggatgtgtcctctgacctcgctactcagggcatggtggcgggtactcaagagtggaccaagaccagcagcatcagcaactcctcggagtttattagaagtgcaagtgcacttctaataaacttatttgtacgattattagaagctagatgcagtggctcatacctgtaatcccagcactttgggaggccgaggctggtggatcacttgaggtcaggagttcgagaccagcctgtgcaacatggtgaaaccccatctctaccaaaaaaaatacaaaaacaattagcagggcatggtggtgcacgcttgtagtcccagctactcaggaggctgcggtgggaagattgcttgaacccaggagatggaggttgcagtgagctgcgattgcaccactgcactccagcctgagcaacagagtgagaccctgtctcaaaaaaaaaaaaaaaacaaaaagtgcagaatctcagaccccaccccagacctcaggcatcagaatctgcattttaacaagatctccaggagatgattgtgttcagtagagcttgagacgccttctgaaatagtgcccgaagacccttggatgcctaagagggccaattgagtttgcaaaaagctcagggtacaaagacgagggcatgatgactctgcccgggcatgtcctgagctgcttccggaaagaagtctcctctgagctgggttagaaggaaaagaaagaagggtttcatgaagatggaaaggagaatattcctggcaggggggtggacagagtaaggaaagtcatggagctgttgaaggagcatgatgggggatggcaattggggtctcaggaaaggcaagtgggaggtggatccccgctcagctctcatcccagtggaagggcacccctcctccaacccttctctccccagagcccatgagcccacgagggaaaatccctggctccctgtttcattagggccatgagttggactttgctatgccaacccagactggggctccatgagataggtcatagcttctgagcactaactctgtgccagcatcatgccgggcacttcacctactttcctttgtgtattcttgaggacaagccaagaggcggttctagagaggatgaagagcagagccatcaaaagcatgtagggtcagcggcacggtggctcacacctgtaatgccagcactttgggaggctgaggcaggaggatcgcttgaggccaggagttcaagaccagcctgggcaacatagcaagacccctatctgtacaaaaaataaaaataagaaaaattggctgggcacagtggctcatgcctgtaatcccagcactttgggaggctgaggcaggtggatcatttgaggtcaggagttcaagatgagcctggccaacatggtgaaacctcatctctactaaaaatacaaacattaaccaggcagtagtggcaggggcctgtaatcccagctcctcgggaggctgaggcaggagaatcgcttgagcctggaaggcagaggttgcggtgagctgagatcacgccactgcactccagtctgagcgacagagtgaaaccctgtttcaaaaacaaaaagaaagaaacaagaagaaaaattacctgggtgtggaggcatgtgactcccagctactcaggaggctgaggtgggaggattgcttgaggctgggaggttgaggctgcagtgaaccctattcatgccactcctctccagtctgggtgacagagaccagaccctggctcaaaaagaacatgtgggtccgggcatggtggctcacgcctgtaatcccagcactttgagaggccgaggcaggtaggtcacgtgaggtcaggaattcaagaccaccctggtcaacatggtgaaaccccatctctactaaatatgcaaaaattagccaggtgtggtggcaggcgcctgtaatcccagctacttgggaggctgaggttgcagtgagctgagatcacaccactgcattccagcctgggtgacagggcgagactccatctcaaaaaaaaaaagagcatgtggactggagccagaacacctggtccagataccgtcatcatctcacatcatctcaacagcagtgtcctcgggaacattaaaagggattttcctacccatatcccgaagtttcctcttccataaaaaggacataaaacagtaatagtatatactttcgtagagttgcagtgataattaaatatatcccatagggtttggcggcacatggtaagcgctatacatgagagttattattcttactgatccccattgaacagatggggaaagtgaggctctgagcatttaagtgccttcttcaggctcacacagttaactatactctactatcttggcaaggattccccatggcctctgccctctctctccacttagcttgtcttggagaccccttaacagtgtgctgcaatctccgcctccgacatcaggcccctctgcctcccaccaatttcctcccacctaactcgtaacatctcatcttggctgtgtgcctgagtctgttactgcctccagagttaggccgtttcctctgcccacagtgcccacctgcccatctctgctgatctagattgcatctttcaaagccagggccaaataacactcttgccccagagactctgcagtgcaccccagagtgccctgctcttcaactggccacctccagagcacctggcgggccagggccatgttgtggacaacttgactttctcccatccttccaaccacagtgctttgtatgcagttggtgctttcataaatgcatgatggccaggcttggtgcttatgcctgtttaaccatcactttgggaagctgaggcaggcggatcacctgagctcaggagttcaggagttcgagatcagcgtgggcaacatggcgaaaccccatctctactaaaagtacaaaagttagccaggcacggtggcgtgtgcttgtagtcccagctactcgggaggctgagacaagagaatcgcttgcacctgggaggcggaggttatagtgagccgagacactgttgcacttcctgcttgggcgacagagtaagaccttgtctcaataaataaataatgaatgaatgaatgaatgaatgaatgaatgcctggccctgccctaattacaaccaattagcccctggctctccagaaggctctgggatatctgtggcctgtggatctcctgactggctgctcttctccctcctaacattcattcctgacctttagccatgagtggctgtcatgagatctgttttcccaggagtgcgagtgagcgctccatatccatcacaatgacagaaaaggacttgatgtgcagggctgggccttcccccatgtgggtgccctaccaactcctccgtctcaggatccggttcctggcctggggcccttggtgtctcttgattcagcccagggtttctcaccctcaacactgctgactcttgacaccagataattctttgctgtaggaggtcattctgtgcacccactagatgccaggagcagtccccacctccccagtgtgaccaaaaaaatgtctccagatatgccaaatgtttcctaggtgtggggggcaaaattgccctctggttgcaaaccactgctatctggagttttgcccaggataaccaggaagggaggaactatggctccagcacagagacgctgcagaggagggctcaaaatccccaaacctacatacaagagatcccagaaacagtgaagatggccggcatgctgagcaagagggggcttacctagctcctgccagtcgtggccaggcagaaattgtggtccaccttttggtggatcccaaggctttcaagaaaagtcagaaatcctatcttttaagtgaaattttctgattcttaaatgtcggcaactaatgtgaattgtttaaaaaaacactgtgggaaaaacaaaatatgtctgtgagccaaatgtgggctactggctgcaagttttgcaacctttcctatagaccaagcttccatcccggaggcatgggcagctcacaccactcctgagcccgcacagtgcagcagtttgaatctgaggcaccgtgaacaagctccatgccaggcctctgaaccagacagacaggccctgcccatgttggccacttcaagtcccttctgaggtccaatgccaagaaatgaaaggttctaaattccgagggagagagaatataggaaacaccccaggacagaggtcaggaagcctgaacccttgcccagctctgtactgatttgctgtgggcctaagcaatcacgttccctctctaggcttcagtttctccctctgttgaatgtttgtaggatgatgaaagagaagtgagattgaattcatgctctctatgtccctgggacttgaaagagcgagcacttcctgttggcagtccagggccccagctagcttgcccagtgcccagggggcatccttgtccttagactgacctgggcagggaaacgctggctccacctcccagctccggcatcctgcatttccgagtgggaagtttgggtggtccctgatggactcctcctctgtgcaatgaggtcattaggcgccggaagctgcttcaggtatggaacccacaccctgtcactgggagagcccacacccttggcccctgctggcactgatggtgcagctctggaacggttccctagctaggaggtgcccagggccacaggatggctcagtgggcaagcctgtacctgactggtctggaatccctaggacagtttcccagtgggctctgcagctgggaggagtcttgctggagatgataggagtagatgggctctggaagattgttctatctaagaccctaatttatacatgggaaaactgaagccatgaaagggaaaagcctcggccaggcacggtggctcacgcctgtaatccagcactttgggaggccgaggcaggtagatcacctgaggtcaggagtttgagaccagcctgtccaatatgatggcacgttatctctactaaaaatacaaaaaatagctgggtgtggtgacgggcacctgtaatcccagctacttgggaggctgaggcaggagaatcacttgaacctgggaggcagaggttgcagtgatcacacaactgcactccagcctgggtaacagagagagactccacctcaaaaaaaaaaaaaaaaaaaaaaaggaaaggaaaagggtcttcccagggccacccagccaacagaacaagcatccacatctcctgactccccgtccagtgctccttctaatctgccacattggggtctcccagtagtggggactggtgagataacagacagaaagatggacagacccaggacattgcctttcactaattgtgcctggagcagccagggaggtcacatacctgggtaaggtagccagaagtaagacagtagggagtggaggggacctaccacagtgggggatgagaggatacgctgtcaccatgtgggatggaatgggggtttgataatacctccctcccacctcagcctcccgagtagctgaaattacaggtgcacgccaccatgcccagctaattttcatattttttgtagagacagggtttcaccatgttgcccaggctggtctccaactccggggctcaagcaatcctcctgccttggcctcccaaagtgctgggattatagatgtgaaccaccatgcccagcctaattttttcaaaaaggccaggtggaaactaaaaatctgaacttttggtgtaagttatcctaatgttaaaatgttggcatccggtttaaaaaaatttttttactggagtactaaaaaaagaaaccacattcacaggccagatgcggctccaagggccaccagaatgcaagtcctacttctctcttttaccctcggtttactccgttttaaaatgggtataagaacaaagcccttctctcatagggcaggtgggggatgaaacgagccaatgccagtcatactgactggcccacagtaaatggtagctattgttctttcctaagacctgagacacttggcaagatgcggaggggctggagtgatggaaggagcttgttaaggttggcacgggcaactgggaggccccgagctagacttgagaatctttaggagtgtgtgcttgtggtgcgcctggcactgtgggcacagagcaagtttaaacccctgcccatgccttgtgtttcagggggagttgggattaggctcacccagcggctcttggggttgtactttaccccaggactccctgagtacccctccactgggcccctgatctgggagaaacattccactcccaaaggtcaagtctttaaaaacaaaaagaaggcagcgcctttcgcatttatccaaacacatttttgcttgtttgttttaatgagaaacttcagggggaagatgccagtccttcctacgtatctgttcaacaaatctgcctcccgaaaccagttccaaagatatttaaataacaatcctgggaaaagaagaatttagaacaaattctaattagtcccattgggactaggggccattacagatttctgccctgagaacccagagaccagggcctaaggtgactttctgatgtccagagtacagaactctctgccttactgtctgggcttggcccatgctggggccactgagggcaaggtaaggcccgttcccaaccttgctgggcgtctttgtagccaccaaagcccctaacctgcctgtgcaggggtggtgggggccctgtgtgctctgccttgagttggagaagctaggagtcgctcgggctgacgtgcctgagttctggtgggcgggtagacaggcgggcagagcccataattatggggaaagcagccgcaggcgtgtgcagacaggcctcctggagcccaggcaggtggcctcctgacaagggagggcctctgcatttggactctgggtgcagaagaccttcaggatggaggaggggatgttacataattccgacaccacagccactgaaaacgcgaccttgccacgctccactgcctccttcctccccactcagagggcatgaagacctagcagcccttctgggcagggcagtggccctcagctgtcacagcaacagggtcacctggagggctgtggaaacagactgttgggcctcgcctcctgggtttctgattcaggaggtctggggtggggccaagaatttgcatttctcctccatgctcaggagagatgctgctgcagctgatcaggggccacactttgagaaccgctgccctagggcttacctgattagtccccctggcccttgatttgctgtacccccctgggcaagtgtctgcctctctgggctttgcatttctcacccaccaacaggagaaaagccagctttgtctttgaacaactaaacccccatcggtgttgggatgcctaattactatttgccggtagcacagagatcttcccaggaaaggcccaggcacgactacacaggggctcttactctattgttccaacttccttgtagccactgagggagatgagtttctctaggagagatgggcactttaagccttaaagggacaggcctggccggcatccttggacctcaccgctgacccagcaagaatctggaagcagttccctagcctgctctttgggatcattttgttgccttcgagaatgggtggcaggggctccatcccagtcccattgataatggcataatggttaagagaacaggttctggagccagaactttctaagtttgaatcttagctccaccttatactagctgtgtgatgtggggcaacctgcttaacctctctgaaccttggatccctcattgataaaatgaggatagtaatagcaatagcacttacatagtactggtacttacatagtacttctggggatgaaaatgagctaatattggccaggcgcggtggctcacgcctataatcccagcactttgggaggctgaggcgggcggatcacctgaggtcaggagttcgagaccagcctcaacatggagaaaccccatcactactaaaaatacaaaattagccgggcgtggtggtgcatgcctgtaatcccagctactcgggaggctgaggcaggagaattgcttgaacctgggaggcggaggttgcggtgagccaagatcgtgccattgcactccagcctgggcaacaagagcgaaactccgcctcaaaagaaagaaaaaaagaaaagaaaatgagctaatatgtgtaaactgctctgtctactattaatagctcttaacaatcatgattatatatctgtgcattgattaattaaatggtaacttttaagtaaggagtctccagcagagtgcctggcatagaggtggcagtgctcagtaaacagtaactgttattcttttcttgggccccttgctggcccctggccctctgtgtctctcaaatcacacgcaggaaatggagacacagagtctgaaaattgcaatggtgaacatagtgtcacgattcccagagccaagggtcccacttggggaagaagaagttccgctagtagccaccaggggcagcagaggacacatcctgcccagcagcactgctgagggttccctctgagtcccccctctttatgaagaatgaagaggtgactgttccccgctgcccacaggcatgcattctccataacccctgatgtgggaggcagtttcgcagaggatacccctcaattctgacagactcccaacgctgccttttccagccacatcaccttggatgagtcctttttgtctccctaaaccttcattttctcatctggaacctggggatagggtggcttggcgggttgaatgagccggaaagcacagtccctggactgatgtcagtgctcagtaaatgacacctattgccaaggcagcatcatggctatgagtatggaccttgcagccagactacgtgggctttagtcctgcttccatcacttactggctgtgtgactttgggtaagtgacttgacctctctgtgtctgtttcctcatctgtaaagtggggatgataataatagtacacttacctctctgggttgtggggaggattaaattaatatttaaattcttagaacactgcctggcacatagtaagtgctatgtaaatgtttgccattattattattatttgtagtattttcactgttgttctttttttttttttttttttgacagagtctcgctttgtcacccaggctgaaatgcagtggcatgatcttggtgcactgcagcctccacctcccgggttcaagcgattctcctgcctcagcctcccgagcagctgggattacaggtgtgtgccaccatgcccaactcgtttttgtatttttagtagagatggggtttcaccatgttggccaggctgatcttgacctcgggtgatcctgacctcaggtgatccacctgccttggcctcccaaactgctgggattacaggcgtgagccaccacacccagtctattcttttaattctcaataagctgcaacattttaactttctgcagaaactttcctacttgaactcttcaaaaagggacttagaaaaggtgagatgtggcccctggataaggaaggactttattattttgttacaattaagaatctaacttggggcccactgtggtggctcatacctgtaattctagtgctttgggaggctaaggtaggaggaccacttaacgccaggagtttgcggcagcttgggcaacacagtgagaccctatatctacaaaaaaaattaaaaattagctgggcatggtggtggcacacctgtggtcctaggtacttgggagactgaggcagaaggattgcttgagcccaggagtttgaggctgcattgagccatcatcataccactgcattctaggctgggtgacaagcaagaccttgtctcaaaaaaaaaaaaaatttaacttggggctcgtgacagtccaacaagcagggcatgaaggcagctccacctgacaccttgaactccatgaaatggcttgaatggcctgttctgcccgaggactgggctaagctctgcctctaggagaagccctttgcaaggccctggaggagatcaggatttctgccaggtcatttggggacctgggaaaaccatcaaagggtatcagtgagcccatgaaaggcccacagaagtctctagcctcgccaggacagatggcagggtggaccccgagtaaaatcctcaccccaccaagggcaaaggtctaaataggtttggggaaaatccagctctaatccttcccgatgcacctggggtcccagagtcctgctgggatggccgagggaagaagaggagatcagcaccatccctgctggtggcctcagcaacaaaggcggcccaggggctgccaaagggcttccaagtcactttggagcccccaggagtggacggagatgacagtctccatagagatagcagggagtgtgtcccgctcagaagccgtgggcaggtcactctggcctcctctgggaatgtttcactagcccagtttttgaggatttaccctatgccaggccccatgcagagctttttatgtgtgcctcatctcctgaaggcccttgccacagcccgacaagtagtgaccatgatcatttccatttttacggatggagaacctgaggattccagggatgaaatcatctgtctcaatcacacgctagtgatttgcatcctggcctctctgcttctagagactgtgtccccaactcactgggtgggcagcttccaagatgaccccaatgatcctgcctcctggtatccacctcagtttgtcttctctcctagattgggggtgagatctaaatgtacttctttctttcttccttccttccttccttcctttctttctttctttctttcttttttgagatggagtcttgctctgtcgcccaggctggagtgcagtggcgcgatctcagctcaccgcaacctctgcctcctgggttcaagcaattctactgcctcagcctcccgagtagctgggattacaagcatgagccaccacgcccggctaatttttgtatttttagtagagatggggtttcaccatgttggccaggatggtctcaatctcttaaccttgtgatccgcctgcctcagcctcccaaagtgctgggattaaaggcatgagccactgcgtctggccaagatctagatgcacttctaatgaacagaatagggagaacaagatgggctgtcctgtctgagattaggctgcaaagagactgtggcttccatctcttcttgcacaccttctcttctctttcttggaggcctctgtgggaagcaagctgccattctgtgaggagatctcacagccaatgaggaactgaggttctcagttcaatatcctgggaggaatggggctggcatggtggctcacccctgtaaccccagcaatttgggagactgaggcaggtggatcacctgaggtcaggagttcgagaccagccagaccaatatggtgaaaccccatctctactaaaaatacaaaaattagccggacgtggtagcacatgcctgtagtcccagctactctggaggctgagacaggagaattgcttgaactcgggcagcagaggttgcagtgagctgagattgcgccactgaagtccagcctgggcgacagagtaagactccatctcaaaaaaaaaaaaaaaaaaaaaaaaaaaaaaaaatatatatatatatatatatatatatatatatatatatatatcctgggaggaattgcatcttgccactagccttgtaagtgagtttggtttggaagtagattgtccctaggttgagcctcaagttggcagcagctccacctgacaccttgattgcagcctttaagagaccctgaactggaagacccagctaagccacacctggattcctgacccatagaaactatgagataatcaatccctattgttttaaaccactgagtttggaggtgatttgttatgcagcaataggtaatatacttcccatcactaccagcgacacacacacaaaacatacccacgcaactaccatgagaaaggataaaaaagagcaagtcaactgcagtgggcagagctagaaaaaccctcctcacacccgcaaagccagcccttcgaacctccagaacactcagatgcagagacaggaggcacttttttgtttgtttgtttttgagacagtctcgctctgttggccaggctggagtgcagtggcacgatctcggctcactgcaacctccgcctcccaggttcaaatgattctcctgcctcagcctcctgagtagctgggatgacaggcgcgttccaccacacctggctcacttttgtatttttaggagagacagggtttcaccatgttggccaggctggtctcgaacgcctgacctcaggcgatccacccgccttggcctcccgaagtgctgggattacaggcatgagccaccgcgcccctcccgaggcactttttcatggtcacacacagcaagggatcctgacattgtggctgaggtcttcataccccctggaaagtttcaccaggagttacaaaactatggggtgttacaaaactctgcatcttccaggaatcaagagtttactgctttgtcttagctaaaggtgtttggagatagtaacatgttggctggaagatctcagtaaaacatcttctacaaatagaaacataaaaacatttgggtcaatgatggatcgatcgcatatctgatgatggtcccgtaagattatactgtatttttactgtagtttttctgttgagatatgtttagatatataaaaacttaccatcgtgttacaattatctacagtattcagtacagtgacatgttgtacataggagcaatagactataccatatagcctaggtgtgtagtagctatctcgtgtaggttgggtaagtacgctttatgattgcacaatgacaaaattgcctaccaatgcatttcccagaacgtcattctgcctctgtccctgtccttgtcattaagtgatgcatgactattttaaaatcatagccaaattgggggtgggggaagggaaagagttcagtgggctcaaatattcaactttaagcagacaccaaacataatggggtctcttaataccatgtttctgggttttgttccttaagccaaatttatcttgtagtcttctccagtgatctaaaggatgttcctctgggaacgaggggatgctctggatgggacctgcacttttttctgtctgcagcctcttttctgttttttttttttttttttttgggtggcgccctgtccagcctgaggtcagggtcatggggaccctgtctggcctcagagcccagaaccagagcagcctccccaccccctgtctggactgcccctttcccctctgaagtcacactatgcctctgctctttaaaatgagttgccgggaggactggatgaggacacctcctgctgtctttccggacccccaaatccccccttcctgctgccccacggaggctggacacagtgtgccctggagcaggacagagtgagccaagttgtatccagcctcaattcccagcatctcccagggggtctgggaaggtctcctggaagtagaactggctacataattggtaggtcccaatgttcaaaaataattaagaatttcaaggcaacaacagtggagcattcacccaagctcggggcccttctgagcacggggcccagtgtgaccacacaggtcacatgcccagaagctggctctgcaaagggatctcctctaaacccccaagagttatcatttgtgtgggacctgcccaagccactcagggcagaaaatgggtaggttagtccttgactccagggtctcctggtggagaactgagcagaaacatctcctgggctcagggcatcctcataaatgtacctcaaggtgtttttaatgtacctccccacccaagacagatgggtttctgataggttcctaactgccaccgtggccacagacttgccagctagcagagttgagagcagggagagtgaggggctacagctgagtaaggggggcatgggcagcctgggaacctccagaaaactggagaagctggaccccactgccatctgcagtcctgggcctgagcatgcaacacacacacacacacacacacacacacacacacattcacacagagccacggccaaactgcactgagtaaaagttacagagggaattccccagggttgtggccttacgaagcagcttggatgactgaaaagtaactaggacgtatgtgcgcttcaggaggttgcagagggaccagtgacggtagcggtgaaatggtccctggtggccaatgggctacataaagacttttagatatgtttactttcttcttcctccgtctcctcttcctccctttccttcttaagttttaaagagttgctaatgtttcaaatttagatttcatgtaaaaatccatattcctagtagttctaaacaaacaaaaaaaagtagaacatctgacaacactaagactacattcctgcctgacaacaatctacagcctcctctacaggggccggtggcctcatttgccacagtccccaccagcctaatgtctctctgataccaaatccaagtgacaggagctacatactcatacttgtgctgggttttgtttataggggtttttttgttgttgttcttgtttgtttgttttttgagaccaggtctcactctgtcgcctagcctggagtgtgctggcacaatctcggctatctgcagcctccccctcctaggttcaagtgattctcctgcctcagcctcctgagtagctgggattacaggtgtgtgccaccactcccggctaatttttgtatttttagtagagacggggtttcaccatattagccaggctggtcttgaactcttgacgtcaagtcacccaccctcttcggcctcccaaagtgctgggattccaggcatgagccaccatgcccagccaggtgctatttttttcttgttatggagttaagaggaaagcacatgtctctatcaaaagtataattcatgtacttccagaaatacgtgaaagactatgtttctttgcggaagtgaaaagtcttcctaagtgtttaatatgccaagagtgtttaagtcaaaataatataacataaatgcccttatgaaataaaccacagtagcccctgctcaacccagctcactcatttatgttcccaggcaggtccctgaaggtaactcagacagtcctggaccagattctccaggatgcaggggctggcaagggcattcctagcttctccgctctcgggtgctcagagtgatcattcttttgttctgctctgtctgttatctcagtaaaggagaggaattaggggattcccagcatctctggtcacttggtgtggtgtcagtttccttcctcctggaaaagtggtgtgggtacttttcttccacagctgggagcacccagcacttcccatgccactctgccgtcctctggcgcagttaaaagtgcactttgggaggccgaggctggcgcatcaccagatcaggagttcgagaccagcctgaccaacatggcgaaaccctgtctctactaaaaatacaaaaattagccgggcatggtggcgggcacctgtaatcccagctactcaggaggctgaggcaggagaatcgcttgaacccgggaggcggaagttgcagtgagccaagatcacaccaccgcactccaggctgggtgacaaagcgagactctgtctcaaaaaaaaaaaaaaaaaaaaaagtgccagctagacagggcaggggttctaaggcagcctccgcagctgggccagtttccatcattgggaaggtgaggatgcgggggcggggggaagctgggaaggccatgatagttggtggccaggccactgtggttgctgagagccagggcttctgacccatgggcaggaaactgctcctaaaaggttttgtagacttaagggaaagtaattaggttctcacagcttgttggacagccataggccagtgacctagaaatttgcacatctcaggcctgggccagtgggagcctcagattatagagccaagcctgggcagggtaaggttgctagcatgctgcctacaaggggaggctgggggctccatgagtgtgtgactgactcctcacctggctgtgtggcctcggctcccgcgtgtctacaacaggggggaactggacctgcctcctggggctgtaaggagataattagtctttctaaacagcatcgtaatccccagatcaaagggggctcagagctgcacacttacttcacaggagcactgccagcctgaacacccactccagcgggtgggttctgttgtgcagaccctccaaggtgccacttcctacagggtttgcctggccttgtcactgttcccccacccactcccagggtccaggctctggcctcccctgccaatggctgccatagttggagagttcatgggcagcactgataatggacagtggggaattactaatgcctaactcatagatggggaaactgaggctggggaagtgaggtgaagtcacagggcctcccaccagatctcagccccctcgcgatctcccccaccagacggtgggtgcactcagcattcccctcacttagaggatggccggtcacacgcaaagatgagcgaaggaaaggtcccggggctgctcccctgcccgcccactccttctgacctctcccggtcagctgtggggacctcggctctcggcaaggctgtcacagggtgtcaggagaggagagagacacagcaaagtggggtgccaggcagaggccaggggctttcaaagaccggggctcgagttccgtcacagccacccctgtgacatcggccgtctttctgaccctccgtgtccccgggaatgaccgcgtcggggatgcaccgagtggcgggggccgggcgcacaacggggcgacgcggcggcgctccccgggcactggggccagtctgggcgccgcggcggggcgggggcggggcgggggcggggcgagcctcggcagtcgccagcccggaaggagcgggaggaggagccgcgggactgagagccgttcccacgtgagaggctccgcggccgaattcctcgcgtgcagcaggcgcggaccgcccggcgtccggccggactgagagccctggtccggcgcgcgccgccggccgggcgggaggcgggggcgggctcggctgcgccccgatgcggcggcgacctccgggtctgtgagcccggcgcgcgccgtcggagcccctcgcgcagccgctggtagcgtccccccgggcacccggcatgcgggcggccgactcgggctcgtgggagcgcgtccgccagctcgcggcgcagggcgagccggcgccttcctgcggggcgggggccgggcccgcgcggcccccgggacccgcagcctgcgagcagtgcgtggacgcggcggggcccggcgatcggccccgcgccggggttccccgggtccgagcggatggcgactgcagccagcccggtaggtgcgcgcggggcggggcggggcgggcggcgcggacacaggcccaggagccgccggggccgggcgcgcgagggcgctcggagccgggatcgggaagccgctggtggcaaagttctcgcagcgcgcggagccccgagccccgggcgggtgcagcgggaggcgtgcgggacgcagagtgagttcctcggcgtggggaccggggctcgggggctgcaccggggggccaggaccgcgcttgccggagccaggcgatcccgcggcgcctggagacccagctccgggctggaccccgcgtctgctgggggaagcgtgggaaaggggccagccctgcgcgaagttggttcggccccctgggaccgcacctgtgagccatgtggcggcccccgcggagtgccgaggggagcccccttcaccgccgcccctccgaggcgaaattgatgcctcgcatttgctaggagcggagagattgctgcgtttctcatacacttgaactccgagtaatgcagaaagagaaattgcagaggtggagacacaaacgcagtgatctaattgcgtttggttggcgaatccgccccaagtggagaacagcgttttactgttaaagtgttcccagcgggtgtgcccgttccatcccactcaggcctgcgctatctcccttccccctgccccttccccccaagttagggcatggggatgggagacaggaacccctgcgtcatcttgactggagtaggaagaaaccttagaagacgaagggcttttctgagaaggggctgccatcaccaggtccaagttctgaatactttttccgggaaaaacgggagggggaggcacaacataattattccttattcatcgaacacctattgtgttctagtaattcacatgcaacacatccttaaaatcttatcacaaccctgggagtgaggctgtgttatctccatgcagatgaggacagaaaagcccggaggttaagcgacttgcccaagttcccagagtcctaaatcatggtgttggaattcccagttttgtccgtggaaatccaaagtcttagcaccataatacctctcccaggcagcaagctcactagctggggagcacacgggcttattttcctaataatcatttctttcctgtaagaaaaaagccaaccacaaggccccctattcttgtttttgcctatggtagcctccccaggagatggaatgccgcctctgggtgtcagggcagagtagtcctctctcctgtgttggagttttccttttcccaccttctccccagttacacacggcagagtccaagacgggttgaggtaaaacagcatcgatgcgaaaaggaagcagatgggagagtttggtcaagttgcttcatctttttgagactcaatttacccatctgtacagtggaaataataatagtaccaactaaagatctgtcattccaaagatggtgtctgtaaaacaccttgcctcattcaccataaatgcttaatgcatgttagtcctcagctccttctggcattacatgcttgccagatgacctgtcagtgctcccactgactcagtttcccattagattgtggcgctctctgctccatctccaccctcatgaactatgtcaagatgacttttgtcttgtctgtaaaatactaaagtgatctgaggctgagtgttgtgtcagtgggagttgttttcatgtaaacatgtacaggagatggctaggtggagatagggctgtttactttgtgtctctatagactccatttgtgtgttcatcataatatcctaatgacacggtatagcccaggaatgcctgtttcctaggtctaggggtggttgttattcctgcagccctcatggtatgtccgttttaaaagacagcacattggaaaactcttttcccagtttacagatgacatcactggcatgaaacaagatcagaccagcagctaaaccagaaagttttgagttttctctaccctactgcccttcaccctttctggtctctggttcttaaagaccaaatcgagtttctgagaacttccatgatggctaggcattgaggacagcctgccgtggaaatggttctgaaaccatcggctgttacaaggggctttcctctaggagggcgatgggaactctggctcaaagctgcaagctgaacttgttgctgaaataaacatttcagccaggctgtgcggtggctcttcctcgaatctcagcacttgatcccaagtcaaatgtggtgctcagtttaaggagctgaaagaggtgccctgttggatgggagagtctgtgaattggcactttcagagatgtggggaagggaaaagatagagggggatgctggcttggtgggatggaggcccgaacaccttgaattgctcagggagaatgtcctgagatcggcaggtgatggccctgtgatggtgacagctctgacctccagggtgcgtgacccagggactagagcaggaggtgcagacagtggatgtttgcacaatccgcacctgcttctgcctcgattgcgttttactctgagatgttccacaactcactttccctgttggcaccaagggaataactccttctgaaggacggatcattccagagccccctcagagtgaaccaggtgctcactggaggttcttaaactgggaacaggaatccggttctttgatctttcattgtccattcattcggtcacatttcttgagcatctgctccgggccaggcactgttgtagctgccagggatatggcagcaaaggagatgactgcagccctggtttccatggagcttatagtctgtgggaggagatttccagtaggcaaataggcacaggatatgtccagagatggtgtaagtgctatgcagaaaaataaagccggggaggggttagaatgatgggagcaggtgctgcttagtttttaggtagggtggacagaggagcacgttctagaatgaagtgaggtgtgtgggtgctgagtttctaaggcaagagggtgttgccgatcagctaaaggaactaagccatttttaaaaggtggtgggaaattagtatctttgtagacgaggcactctacaggtctgtaactgaagcatctgcactctaacccttttgctccatttggcatttctcttaaccccgagctcagaaagccacgtggccttattctgcctcttcacatcctctacctttttaaaattctgtattattttattacgatgatcatttgggttcttatcacttcttgcccctcccctttacatgaaacccgcggttgaggggactggggcgcttgtgtgtctttgtctttgtgtaccggctcccagcactgtacccttctggggaccagttgtgtcgtgaacgaaacaggatgccttgtcttcatgggtcctcccagcaacccaatggggaagtgcagttgctaatcccatccacagatggggaaactggtccttagaacagttcagtaactgcccaaagccacacagccagtggatgtcccaaccgggaatttatcccagaccgtagacctcagcagtatggaaagacttcacgttgctcttaagaaagtagacccacattatggcggggcgcagtggctcacacctgtaatcccagcactttgggaggccgaggcgggcggatcacgaggtcaggagatcgagaccatcctggctaacacggtgaaaccccgtctctactaaaaatacaaaaattagccgggcgtgttggcgggcgcctgtagtcccagctacttgggaggctgaggcaggagagtgtcatgaacctgggaggcggagcttgcagtgaaccgagatcgtgccactgcactccagcctgggcgacagagcgagactcagtctcaaaaaaaaaacaaaaaaaaagaaagtagacccacattgtttctggtctctttttcctttaaatttttatccttaaaaaaaaagtttgtcctctccttgacattccttgttttaagcaacgcaagcatttgcttatcttcctgctgttagcaatttcagtgggaggtctgctctctgtgagccgttctgagaagaacttgtgctgggactggatgagatgcaatctccactgcttggaattaagaatggttttacgaagctgcccactaggacccattggtgggtttcgtgtgagcatacttctgctagcagggcgagggcaggatggaggcaatggagggcttggttcttctggacaatcagggtgaaagccactgctgagatccatttccctgaggagtctcaacctgtggtccggcaccctctgccctccaccctgtgttgtggtccagtgtgatggactgaactttatccttctgccaaggctggtggcacgccatagtgggtacagggcaccagttttggaatcaaacacacactgatttgaatttgtcagctctgctccttactagctatatgcccctaagcaagttatttaatgtcccaagcctcagtttacccttctgtaaaatggaaattgtattacccacctcagagttgttggaaattggacaggaatctgtgtgattagcatcctttccccctgtggggcctgatgctacccatgccataaggaaggagggggaattcctattcctctagactccaaaggacttgatgtatatgtgtttaaaatatatataatacattttcttttatttttgaagtttgaaatattgggatttactcaaacaggtgactccaaagggctgctagctgcttatttggctttctgagtcatcacgaaatctccataatgggcaccaagcaccatttatgttctttgtaatactccagttgagtgaactggacaatttgccaggaccctccagccattctggaggaagaagagtttgttcattttttaaatcatctcaagaggaaaatagcacccctggctctggggttagcctccctcatctgtaacacagcaagctgacaaaaatggaacgtcagcacatttgcatgtagacagattttagtcccagcagataagcacacccaacatgtcattaaacccggccgaagccatcgccctggggatcccgtgtttgctgtgagtcactaagggctgtaaacactccagagagacaggcatggttataaggggtgtgcgggcgtggagttattttaatggatttactctccgtgagtgcgtcttatgttgcgggtgccagatgagtgcctttcaagggagagggaaggtcaggcttgcctcctgttcacaaggacaacctctgtctcccttgtggcggcttctatgaaggtggggactccaggctttctctcgtctgctttttggatgccttcaagagaggccagttagaggatatcaattgtggcaattccccagagccctcatcagatggcattagcccgtcatgtgctgcagtggcacccagtttggaggaaattcggaaccagaagagtgtgacaggtacgtgagtgctggccgctgtcccagccctgaactggctgacactgagtctggcctaagcagcggggagctggtgggctctgggtggggcccgtcctcagtctacgtgctggacactggggactgttttgggaaacaccctccacctggcaccaggtgggtaatctgccggtgcccgtggtctcgtcttttgttgcttcttggattcggaggctggctcaggctcccagctagtttgggctgtaactttatcacaggcattcactgtgttcactaccttttaattgtacagaagtttcagaaaagctctcctggggaattggagagaagtaaaaacaacagctgctatttcccggatgctttattccctcccctcacagcacagcctcagcagcatgttcctgactttgaagttctatgtgcccaggctgggaagaatgtggattttcgctcagtcgggtcccattagtgtggaaggatcattgactgagggccgagcaggaaccaagcaccttgttacatgtgttccttttgatccccctcttcctgtcaggcagctgccattctccccatcttacgggtgagaccactgaagcttgggagaggttacaccggctgtggaaagtagctgttccaggctgccatgctgccctcctgggacccttcctcctgcagtttccttgtcagctgacgattccccgggctaccaggccacagagcggaggctgagctgccgagagtcacaggacttttcttcctggcaccttcggctcactggcttgccaatcagccagagccagttgggaggggggaaccctgggggcccagagtggcccccgatctctgtcaacaggagactctgcccctgccccttcaccccagcccgaagccagaggcaagctggctcctgacgggagactcccccgccacaaccatttggaaatctagaatgcagagccctgagagggaaacctctgcagggatggggtgaacccgtttcctctactaggtgaggaaactgaggcccgaggctgggaagggaccatactccagggtgtcacacagggaggcttccagggccagatatgaaaccttagaaaaggtatgggaggctgggctcgatggctcacacctgtagtcccagcactttgggtggccgaagcaggcggagcacttgaggtcaggagttcaggaccagcctgggcaacatggtgaaaccccatctctactaaaaaaaaaaaatacaaaaatgagcccagcatggtggcgcatgcctgtagtcccagctactcggaaggctgaggaaggaaaattgattgaatccaggagaagaggcagaggttatagtgagctaagatcatgccactgcactccatcctgggcaacagagcaagactctgtctttaaaaaaaaagagagaagtcatgggaatgtcttggcagcactggaaattttcaccctttaccatcttcccagccctctctgacccattcaaggagggtctcagacttcagggattgcagcggtctggggtgcttgctaaggtatagattctcaggctcccctcctcccccgccaggaatctggatttgtatcaagtaccctgcgtaattttggcattccacagatcagacattgagaacctctgccctttgctttcctgggattgggttaatttttttagagtaagaaacccaggagggcacatactctggtttacactgtgttgcccaggctggagcacagggacgattcacaggcacgatcagggcacgctagcaccttttcactcccaccagtggcccaaagtacacagtcaggtagatggacatctaagttaaatctcgctttttttcctctttatgccaacccctgtccgggcacgcgtgttcccagaatctactagaaagaggcacgtgcctttctcagtcttgtgaactcacaagactgccgtgcagtgagagaacacatggaggctttggtggtagctgtttggataccctgctcccggctccaggctgcccaccagcaccccgtgtttcccgttcaccctgaattcctggctccttgagccccgcagaggagccaaggcgctgggcagggtgctaaggagacagaggagaccaaactcttgtcctgtgattcacctctgggccgcctgtggggcctgttcgtccatgctccccactatggctccccaccctccccgccccgtcccctgccccgggtccctttcattgtcgggcgtgatgccgttcaggtggtcagacatccagctgggtgcttgtctgtgcttcctctggcatctctacctgtgtcagccagacagtggagagccacgtgggggagtttctatttactctctaccctttggggagggaagccaaggggcctgggaggtttcgaggagagcctgcgtggggccctcccctgcatggtagcccctgggcttaaatgcagctagtacgactgaagaactgagctttaaattgtacttaattgtaaaaggccccatgtggctagaggctcccatgttggagctggccctgaatcagggcatgaggctcatgagtgtttccaaggcccgtcttagcttgggaagcctgagatgtgtgtttttccaccgacaagatgtgtgttttccacccacaaggagctgagccctgacatcggtgggctcaaatgcagagtcccaccccagaaactgactccagggtggagttcagaaccctgcactttttttttttaattgaattttttgtattatggtaaaatgtatgtaacataaaattgaccattttaaccattgttcgatattcaatttagtggcattaagcgcatttacagtgttgaagggccatcaccacaatccatttccaaaatttcttcatcaccccaaacagaaaccatggcccattaaacactaactctccatccctctccccagcccctgccaaccaccattccagtttctgtctgtatgtgttggcctgttccaggtacctcatctaagtaggatcacaccgtagttgcagggttctgcactatttatttctttatttatgagatggagtttcgcccttgttgcccaagctggagtccaatggcacaatcttggctcaccgcaacctctgcctcctgggttcaagcgattctcctgcctcagcctcccaagtagctgagattacacacatgtgccaccacacctggctaattttttggatttttagtagagacagggtttcaccatgttagccaggctgctctcgaactcctgacctcaggtgagccgcctgcctcggcctcccaaagtgctgggattacaagtgtgacccaccatgcccggccaggttctgcagttttaacatacagtccattcctgccccaccgctgatggtcctggaaccacatctggaagtaccttgtcttaagtgttttatccccaacatgtctcacacttcccttagccctttaaacagggctccctcacaggtgcactgggaaggtttggggaagatgtaaatccaggtatctttttccaataattaaaatcagcaccttgatatgtctctggcattgtgatgtacattttaattcttattttagagacaaggtttcactgtgttacccaggctggtgtgcaagggctgttcacaggcatgatcattgcatactacagccttgaactcctggtttcaagccatcctcctgcctcagcctcccaagtagctaggactacaggcatgtgccaccacacccagcagcatcacttttgtctgtttgtgtgggatgtagcttttttttcttttttttttttttatgagacggagtcttgctgtgtcacccaggctggagtgcagtgatgtgatctcggctcactgcaagctccgcctcccgggttcacgccattctcctgcctccgcctcccgagtagctggttagctaggactacaggcgcccgccactacgcctggctatttttttgtatttttagtagagacggggtttcaccgtgttatccaggatggtctcgatctcctgaccttgtgatccgcccgcctcggcctcccaaagtgctgggattacaggcgtgagccaccacgcccagccaggatgtacctttttaaaaagagaaatgattggggtttttgtcagttttcttttctttttttttttttctttgagatggagtctcgctctgtcaccaaggctggagtgcagtggtgcgtcttggctcactgcaacctccgcctcccaggttcaaacaattctctgcttcagcctcccgagtagctgggattacaggcgcctgccaccacgcccggctaatttttgtatttttagtagagacggggtttcaccatcttggccagactggtcttgaactcctgaccttgtgatccacctgcctttgcctcccaaagtgctgggattacaggcgtgagccactgcgcccggccctcctttttcatagcatatttgtgactgctaagccccaggaccactccttgccctggggttttgaacagaagggcacctgctgcttagacgctgtagtgtagggagacaacctttccttcagtatgagacagattttctgttcagcaacgggacaggctgccctgggaggcagtgggttccccagcactggaggcatcaggcagggactgggtgtgccccatcagggtaccagagtggtcatttgggggctgatgctggccagtatccatctaaatactcaattgcccatcctggcctccagtcgccccctccatctctcctttcagagaagggtggggaggttgggccagccaggtctgtggccctgcagccaccttcacaccatgagcgttccctgctgcccaacagcttcaaacatcccaggctgagggtcatcgctgatctggggtagcccttcttctagcgccgggggcctctgtggcattcccgtaaacctccctggctggggaggagttgctggacttgcatttccacagtgccagccctcagccttcctgtgctccttccaggccctcctgggtgcaccagcggctgaccaaggggcaaacctgcatccctggttttccctctgcagggacagaggctaccccttgggttctggagcagtcacggatgcctcccctgccagtctggcctgacttctccctcccaccagggtacagtggttctttcttttttctttctttctttttgagacagagtttcactcttgttgacaaggctggagtgcggtggcgcaatcttggctctctgcaacctctgcctcctgggttcaagaaattctcctgtcttcctagcatcaggggccctactgtgtcctttgtgcctttgcccccaacccccagccccatcccccagaaccgcttgagctggaccatcgattctcaaggtgtgccgccaggaccagcaacatcagcagtgcccgagaacatattagaaatgcaaattctctgtccactccggacctacagaatcagaaactgggggtgggcccagtctgggtgttaacaagccctgcaaggcgatgctgatgtaactatagtctgaaagcagccactgagcaaggtggctctagaaagctttttccacttctatttttcctctctccctccctctcccctctcccttccccttctccctgtaccctggcctgttccctgcccagctgccaagggctggttggcccttctatgcctaggggctactggatgtgtcactagatggtctgtctgcctttcacaagggccttcagagatcctggccttacccatgggacagccctaatggtgatgttggtggggcaagcggagctgcagcctatagcacccccgccccatcttctctcccaacatcccaggtggtggccgcctgctccccagtgccagaattttagaagagcagagggccagatgggcccatttccctggagcctccaagcccccctgcccttggggacgcctggacgacatccgcccatcccacagctgtgctcagcagacattgcttttccatgtcatgtctctccagtgtgtggaaaggcaggggaggtgacgggcagaacatcaaccctggctttgcagattacctgctgtgggaccttgtacagttcactcaccctctggacctgtgtccctgtttggtgaaatgaaatcatagtgtcagcctggcctagctcacggatctgtggttgctttacgagagcccgtggatttggaagtgcttcactcactctgaggcacattagagatgcggttggtaccatcagatgcagttggtatcatcggttggtagctgtaggatgctggtgaagacagacctgtacctggggcgaccaaattgtcctgtttttctcaggactttcttggttctagcactggacatcccgcaccatgggatatgccttggtctcaggcaaaccgggctggttgatcactgggtgccctgctccactgtgccagccatactcggctacttttgccatatagaaagggatccctccaccctcccagcagttaaggcctcacctacctgctccgcccccttttagattccctgatcactttgatccttcctcatcccataagtacttaccaggcccccactgggcgcctggaactgacagctgagcaggacgaaccctactttcatggcacttatattctggaagagggtttttttctgcctaaaactcctgactgaaaccagaaaggaaagataccctccctcaccctgtccccagatgcgacaagcctccttgttcatccacatggcgggcatccagcacctgctctgttctcggttttgtgtgaggctccataaacgtgacagtcccccttctgtctccagtggagaggagctcagggcctgtctgtcccatgaaccaccctggctcattcctacccttcaccttgctagttcttgcctctgttatcttcccaccccgaactaagtccacatccctccccatcctgggcccccaacctttctgtgagcctttcttgctcattgcagcccctctgggcataattcttgcagtgtgcagcccctctgggcataattcttgcagtgccatctgcaagtgtcacccagaggacagcgtggcagagagtggcgctgcagaaggtgaagatggctcctcagcaagcctgtgtctatgccccttgctaggtgttataggaccagaggagagccttcatcatagaccctgctagttaattacttgcaggttttcttagagcacctacttggggccagctccctttctagttccctgcagaggagctcagttttctcttttacgagttgtttgtactttcctgcctttcccttccccctccatcttcaaggactagcaaatcagttgccacctcttaggttctgtccacagtctcctggccgtaataatcacgtcccctccgcctctctccctgccatccttctttgatcacacaagtcccaggtcagcttgtaggaggacccctggatctatcagcctcctgagtatggggcctgggtggggttgactgaacaccttctccttcccaccccagtgtgcctgctccctcaaggggctgcataagcacttgctgtcacgtccccttcgccagtttcctggcacatccctgatagagctgagcacgctgaggtcagcaacagcagctggtgttttgggtgctccagacggcatctggctcctctcagtcttcccagtgggagtctgatcttccagcctgtgcctggagcgtggccatctccctgaaaggcgctgattgctctcctttagaggtgacttgaatccatacccagcaggcaggccgatgctaccttctcacagcagagcaggcatgcatggcccaggaaggtaggaatttagcaacagggcacctttgccttactctgtgcttggtggtatttagggcgttttagccttccttgtgtagaacaggctcccctcactgagctaggacaggtacacagacacagggctctgagtgtggggacgttggagtctatgtaccaagtgcttagggtcatagagccccactgcctgggtgcaaattgttccaacagtggggaccctgagcaagttccttaacccctctgagcctcaatatcttcatctgtaaattggggtgctagccctatctagtaggggttttgtggagattaagatcatttgtattggttcaaaatgggccggatgcggtggctcacgcctgtaatcccaacactttgggaggccaaggcaggcggatcacctgaggtcaggagttcgagaccagcctggccaaaatggcaaaaccgcatctctaccaaaaatacaaaaattagccaggcgtggtggtggacacctgtaatcctagctacttgggaggctgaggcaggaggatcactggaacccgggagacagaggttgcagtgaaccaagatcgcaccactgcactccagcctgggcaacaagagggaaactccatctcaaaaaaaaaaaaaaaaagggtgctggagtgatataagactcaccagagagatggccaagtcagacaagtccagagtccaatactcaataggacgtcaagcactggggcaggatttggacttcctggggagaaatttttgcagttagcatctgcccgggctttgctctcccacttagaaggggatatctggcgacagttggtcagaatctcatgcattatgagaagaccacactggagactctcgggcaagctgcttaatctctttgagcctcagtttccacctcttgtaaaatgagaatgatggcacccatcctacagtaggaacttgccaaatagagctgctgctttatcaataaaccatcttagatactgtgtgcaatacaatggattgcagataatgatgtttatttatttattcattttttgtttgattttgtttttgttttttgagatggagtctcactcagttgcccaggctggagagcaatggcatgaccttggttcactgcaaccaccacctcctgggttcaagctattctcctgcctcagcctcctgagtagctgggatcacaggcacccaccaccacaccaggctaatttttatacttttagtagggacagggtttcaccatggggccaggctggtcttgaacacctgacctcaggtgatcaacccacctcggcctcccaaagtgctgggattacaggtgtgagccaccgtgcctggcctgtttattcattttagacacagggtcttgctcttgcctcccaggctggagtgccatggcaggatcattgctcgcttcagcctcaaactcctgggctcaagtcatcctcccacctcagcctcccgagtagctaggactacaggcacacaccaccatgcctggctaatttttaaaacattttgtttgtagagacagggtctcacttgttgcccaggctggtctcgaactcctggtctcaagtgatcctcccacctcagcctaccaaagtgctgggattacaggtgtgagcctctcgcctggccagtgatgtttattaagcatgaggtccgcattggcagtgggaggtgcctctgcattgggacgtgcctcttgcatagggtggagtgtgtgtacttgagggtgtgcattctcgggcactcgcctctgcctgttgggatattgagagccgtgacagtgactgagctttgagctttgttgtccacggcacaggctcagggtccaggcactgtgctgagcagtgataacaggaggtccctgccaggctggacagagagaccctgagctcctcctctggaggcagaagggagactatcacatgaaccccagtcacagggggcctgggttgacctagggaagtcctcaggctcagcctcaggagtgccaggttccaaaggcagtggcagagccttcacctagcctgatcatcccacccagggaggggtctgcctccctctgtacccctgaagcgcttaaatgcctgggaggcaggcattgattggtccctgcctaaccagtggtttggcaggccatggatcaggtgaccatcttggttcagtcagctgcctctgtaagagtgggcggggtacttggtatagagagctgcttccttccagggcctgtgggaaagtagctgtggtgggaggaatttagggcaaggaagacagattgactcataatgtccagtgcagttgttccccttgagtttgaataccttcagggattggaaactcacttcctctccaggcaacccctacaatttttgattcgttttaagcattcactcacttttatattgagccaaaaattgatctcacagtagcatccacccattggcctgtgccctacacttgaggatcttacacactgagtctgtttccttgacatgatgacccctctgttgtaagaagacagccaccatggcacgggggccagcttcgtttctccaggcatttttcctcccagccagggcagagtagaatgggttgggtggttgggagcacagggcttcttgccttgatcctcccagcttaaccaaccttagagctctcgtcccctactgggagctctttgtgagggtggaggaagagctgctggagcctgtaccttctcttgcacgtcctaaggaagaatgttccccgggctgagctgtgtgttcctggctctcttgatgtttgtttaagaggacatagcaggaactcaaagccatcaggcagcccctctggaagcaggcaggaagaggggcaggtggaaatgactgcggagtgctatcagggtggatgtggctagcccagtagcctgggcctggccaggcaggtggaaatgaccagacagatgtcattctacctttctttttttttttttttttttttttttttttttctgagagacgcagccttgccctgtcgaccaggctggagtgcagtggtgcaatctcggctcactgtaacccctgcctcccgggttcaagtgattctcctgcctcggcttcccaagtagctgggactacaggcgagcgccgccacacccagctaaatttttgtatcttttagtggagatggggtttcactatatgttggccaggctggtctcaaactcctgacttcaggtgatctacctgcctcggcctcccaaagtctgggattacaggcgtgagccaccacgcccgtcttcattcaccttttctgtagcctgccctgcatccccaccccagtgccatcaggtcaaaagggacccaaaggcatgcagtggcaagttcacatattccttttggggtccatgagtggcgtccaaggccaaataaacagtatactcacctcttggcaagagggtcctgagaacatgggcactcagccgagagattacaaaaaagaggagggcaaagatggaacaatacattaactgccgaccattggaaaaaggaggttgaatttctctgcctgggaatttgtaacctgaatcagcagcctatcttctaggccagggcagcctgggttggggggtgggatgggggtgtggggtggggaggttccggttttttttaccctgcttccccagaattagctttctgcaggtgtacatgcagagaagatgcgaatttcgaagatgtatagctttctccagagatcaggagcagggaagatttcctgggcactggagttatcctgagttaattttcatgaatgccgaaagctgaaaacgctttggttctgcccatggtctttgctgaaatccatgctgtctgttcaccaaagaaggaccagagagctgctgtcctcttgtctggcttcctgggtttgggcttcattgtcccaggcatcaggatgagagaataactagaacccggcattggtcttttgttggatttctgggatatctgcagctatgggccgtctaccgctggaggtggggtgacctcatggcttggttggtggtcagcctacaattccagagagacgtggcaatgagcccactatacagggcttgttcgtgtcccaagtcgtgttacaatgcaaacacctgctcctgattaggacttttatttcttcaattggtttattttctgcagcttcacccaagcgtggaggcagtgttgaagcatcacaagctgcggtgtttatgtggcttgttttgctttacacctcccacccctgccagccctgtacgcccagggtgcacatatttgtcccctgtcctcctcaagcagccacaagtgatcatggcattattgcagatgtgtcgggaaagaggaaacgtccccagacgttccagggatatatatggtttgaggtttgtggagtgcggagaggaaaaaggaaagatctagtagaagttcagctcaagagagtagggcaggagaaggctgacttagagaataaaacatgtagatgaaagaaacgcttccgacccgctccaaacgttaacacgcagtgtttctgcacaaccttctgttctttattcaagctgcgcactttgatcctacagcagccgaacctagaacctactcttctctagtcagtatcattttctcctgggagatgaggggtagagggtggctttaaggaaaaacatgttttggcatgaaagcacctctggccaggagactgtagtcctagggggtctttggcttgatggaaggacgcttttgcccctgggcttgtgccttgggctagctttagctcaatgggcacttcttgggcttagagcacaggtcagggctgcaccagatgctgcagcttataatacctggccagaagggtgtctaggaggacctggaaggatgcttctctgtacaagagatttccttgtctgggttagcagggccgtctgtaatcctctaagaaaggcaggcctggagctggtcaccactggtgaaaattcggcatcgcccttctgtcttcctgcttgttgtggtcttgtgttatgttgaactggatgtgagctgcgtgtgtgtgtgtgtggtgtgtgtgtgtgtgtgtgtgtgtgtgtgtgtgtgtgtgtgtgttggggaggagagccttgggtttttttttttttttaatttacatttttcgaatagttttctcctctgctctccttagaggcggcatgcagagtggaaacagcgtttgacctttgtgaattgtgggcagagctagccagacagacggggaaacatttggtgggaagtcagaggccactcagagcaagaattaaagttccgtctctacctttttcagtccagaaaccagagaaagccagaggggacagcagcagaatagtgcccaagcctccagattaggattgcaggatcacttcctcagcagtcaccccccgccagctgctggagagcctactccggagacctctcagcaaagaatgttctacctgaggatttacatcagagattccagaagtctctggggacccaggacaatgcttcctggcaagggctggtctcacaacgagaaggcagtgtggttcttgagggaggagcaggagggaaaataataaccaaaatgtatgtagtacttgccgtgtgcccagcaatgttcttttatggtatagacccccaattaatccctacagcaatcactcccattttacagatgagagaactgagtcacggagaggtgaggtgacctgctcaagatcacttggttagtaagtggctgggatgccttgcttggagatgtgtttctagctgcttagacggcatcgcctctcaggcgaggtgctcagtgagtgtcaaaaccaaaagttgagccgggcacagtggctcacgcctgtaatcccaccactttgggaggctgaggcgggcggatcacctgaggtcaggagtttgagaccagcctgaccaacatggtgaaaccctgtctctactaaaaatacaaactaattagccgggcgtggtggcgcatgcctgtaatcccagctacttgggagactgaggcaggagaatcgcttgaacccgggaggcggaggttgtactgagctgagatctcactactgcactccagcctgggtgacagaaagagactctgtctcaaaaaaaaacaaaaacaaaaaaacacacactggatatgcagcttctatgtcagggtcgagttttcttgtgggggaagaaattctgtcttcagacataaaggtaactcggggacttgagtttgtctgcctcttcccgctcccagctccccctcctaaaaaaaaaaaaaaaaaagcaactcacatttttctgtgccttaattatatgtttggttcacagactaaactgctgaaactctgtaagtgaagtaagggtgtttttctaatcagctgtgttcatttctagtcctgaaaggttgtggcctgatgccggggagacacagctgtgggggcccccgttggtgtcctacttggtttcagaagccatgcctgccacggcccctggagatgggatggaccattctggaattgcaggtctctctcgccttcgaataggcaggggtcctagggggacacgaatgaactgccccagagaggcggtctccagtgtggactgcctggtgtctgtgcatgggagatgggccaggggcaaggggcaggtggggaactgggcttgggcctccccataccccagactcctatgtgacccagctgagtcatggtgctgttcccggggccttggggttggctggcctttatttaggacaataaaacccaccattgtaatcttcccaggcagctgggatgataaacagagaagtgagcacttggaaggagggaaaagtgctttattcagcactttgtcaatatcagcaatatcagcccgcagcaaggccttctgcggatggcggcaccatcctgttctgggcagggcaggaggcctcttgcccgcctgccagctgatctgcattctgggcttccttccgagttacattcgttgggttttggggtcgcagtggccctgccacacattcagaacagcatcctgggacaaagtaccgcaggggacagcaccaggctgcacggaggctcatggcccacagctccctagctttctgttcttgggcaggctccttatcccttttgccttagtttccccatctgtcaagtaggactgaaactacccctgaggtctctgggaggttgcaggggatgtgtgcccagcatcaggagcacccctgcaggcctcgcagctatagatggtggaagtccagtgctggaggctgagttgggtctcctgtgaggcagtcccccgtggcccagtcctggtctttctcagcccaaggtaatttttcaattaactcaattggctggaaaccggggcgccctggagtgtgggaaaacgtcccaggccggaagggccctcccctctgcccccactcatttggggcttggcttccagagggaggatccagtttcacatcgggacaccaggatgtgatccccgtgcccctctgaaaaatcccagatggcgccttctggaagccctagcagtctccgcactggcggccagtctgtcctccctccctgccccctccccccaccccggctggctccccggcccggctccagctccggtggggagagcctcaaacactgctcgttagtgactttattgctaaacaatttagaaaggcagccctgccagttttcataagtgaaacatttaaagtatgcaaagcatattttatttcttcctggagcagctgctcaggcaggctggagagtaatcgggagtgagttatatggatttgtgagctgccccgcagcactttcaagctccacggcctcgagagcctcccaccaaagggcaagtgtccgctccggcccggaagacttgggcagcctgagcccaagacttgctctcctttcctgtcgcctccatggagtcaggcatgccctgtgatggcatcagcagctgtctgccagtgttgacggagggctcatgggtgccaggccgcttgctggggctttttatctgtcctcaggcattggcacagcagccctgggagatgaatactattgtgatcttcattctccacacaaggacagggaagtgacgtgccagggtcaaacaactacccaaggacagagccaggatttgaaccaggccatccagttccagaaccactgctcttcactgtcattgtggccattttacaggtgaggaagtggagggacgtagaggtgatgtgattgccggaaacgcccactaggtgtgtaccttcagaagctgcatgggagacagtgagtccccaggtttgccatttgctcagaccccagtctggacttcttttaaattctctctctcttttttttttttaattctctctttttttttttttgagatggagtctcgctctgttgcccaggctggagtgcagtggcacaatctcagctcactacaacctctgcctcccgggttcacgccattctcctgcctcagcctcccgagtcactggggctacaggcgcctgccaccacgcttggctaattttttgtatttatagtagagacagggtttcaccgtgttagccaggatggtctcaatctggtttaaattctttagaaagcacgcgtctgttcactatggagatctgaagatgtgtgaactgcaggctcaccacccttgtgtgatggcgacgtctaggagagccttcagctgagcccccgttcacctacttctcctcttagcagaattatttacatctgcagggactgtcagcatgccttactcattttgctgcatttaacccgagttgaaatctgatactggcttagcatgtagtgtgtttccagtttgttctccagctcatggtatagccagtggccgcgcggttgaggttgtggattccagactttcctctaggctttggtttgattgtctataatatggaaatagaaatgcctgttctttcccctagtcttctcagaaagttagctctcccgcccggagctagacacgggagaacctgctctgtgaggtgtggggcaagcagcttccatctttccgtgggttctgggaatgggtggagaaggaaactgagacactgggtgttatgctgctgagtcacactcagggtgggaaagaaagcagggctgggctctcccggccgttgtaaggccgtgctcaagttgcttcctcccgatctgcagtgagctttgggctccctgtgtggatggtgtcatgaggtggtggatgtaactaatgcgcggccttccttctttttcctcttggggtgttggtaatttttttttcctcaagggtggggaagagggaggatggatgaggatggatggaaagtcctgcacagtgaggatgtggagggaagcaggcagtgccacccggggcttgctgtccctcccctgggtacctcccttcaggagcctggccttggggaggggaggagattgttgcaagagccaagactgggggacctggccatttttttcatctgaagctcaaagacccagtttcaacgctgtgcccaatttcaactctgtgtccacctgtgagactatttgtcctgacatttagtttgcgaagcaggcacagcatgagacttagggctgggagcctatccagtggttaggaacatgagctttggaatcagaccagccggggttgggatccagctgtgccacctggaccagctctgtgaccttgaacaaacctgttgaagcctccattactgcctctgcaaaatggagagaatgctagcacttctcccatggggttggtgagagaatctgatgggctgaggctcagtgccaggcacatagtgaacacccaaatgggagctggaaccctcaggtgaaccccagtggctgtgggttggtgcaaagacccctccagatgggggaaaaggagaaagactgatatgggcaggaaaagcctggaaatggctttgaggcagaacttgaaaggtttgtgacatccagtgtttcagtccagaaggactggtcactgggaacaaagagaagctagaattgaagtctaaagagtgataagtgctcactgcttggaagaactaagttcccttgtccatttttgctcatccagtttttgaagaaagaataaggtagccttcaagtttgtagggaagctaagtgcccagaaaactgtctctgacaaaaacagtgtatcaggattctttttcaagtacaagggataaaaaagatgcaactcaaactggcttaaatgaaaaagggaataattggcttatgtaactgaaaagttcagggataggatctggcttcaggtgtggtgtgatccaggactcaactattcggatattatctgaatcctgtcctggtctcattggctcctcccctcccaatggcaagacagctgccagcaactccaggctccatcctcacagcctgagcccattggtaaagagagcacctggatcctggtgcagagatttacctctgattggactgacttgggtcatgtgccttctcctgaaccagtcacagtggtcagggtgattcagtaatctcattagccagactgggtcatattttcatccctgaaccacaggtgttgacagtgggggctcctgaaagggaaatggaggtgccatgttgaaaagaagggtcatagatgtcagccagacagaaacgtctgctgcccagtccagcgggggctaatagagaaatttggaaagaaaaggctggatgaggtggcctctcagagaaagcagtagcatggaggctcagcttgatggctgtgctaggagtcttccttgtaccaataggatggcccagtaagctcccatcccaagtcagcccacctgacttgtgatgaactggcaacaacttgctgcttctaatccctcagtggaaaatgtgctcattaggccagtcatggtggctcatgcctgtaatcccagcactttgggaggctgaggcgagcagatcacttgaggtcatgagtttgagaccagcctggccaacatggcaaaatgctgtctctacaaaaaatacaaacattagaagggcgttgtagcacatgcctgtaatcccagctactcgggaagctgagtcagggcacttgaacccaggaggcggaggttgcagtgagccaagatcatgccactgcactccagcctgggcaacagagtgagactccgactcaaaaataataataataataataataataataataataagtaatttgtctgtggttttacattaagcaactgaattgggattaaagggaaaaaaacattcctttattaaaacaacagttaataaatactaacttaaaaacaaaaaaaagaaaaagaaaatgtgctcactgagggctggaggaggcagctggccaggccctgagcagaggccagcacttccccatccctcctgcccaagcaaattcccaagtaggtaggagcagactgttcataagtcatcaaggaggcctggccatgggctctgggactgagcagtccttgctgccaccagcagtcgggaacccagccactctggtggcaggcaggtgcctgcctctcccacccccacccagatggtgtttttcgagattcacattcctcctggtgccagaagcacctgccaagtgatttttgtagcctctgccatgaaggtgttacccaaacctccggcagaccccagggggctgcgtcctgcagtgccaatcctcaggtgaagtggggctggaggtctgcgattccttgacttccccaggacatccctgcttctgagcctgtgactgtcacccttccaggacagcgacatggttgctgcccagcctgtgtttggtgaggggtgggtgaaggcatgcaggagagtacaggttttctggggtgtggagctgggtgggcccatctccccatgggaactctgggcagcaagatggtagaagaggatccgcttggcactcagggcaccgaggagggtctggctaaaggtgtgtttacaggccagcggcttcaccggaagagcctctgcacggaagacggtttcaacaccacctaacggaaaaaacagttactgtgcaatatgagaaaaggacaaaggctgtattacctgagtccctgcaccctccacacccacccgtagtaagaattaccaagcggctctccgggctggggagcgccgtggaagaaaccctgtggaggagtgggtgggtgttatttgagagtcttctcctatttggggattgctgtactgcttcccatcaccccctaccgagtgtcaggatcatatgacacaggcccagaggacatggaaatctccaccaagccaggctcctgttcttgcctgcctgcaaccctggggactgagggagggatgggagggtccgtttggcaaatggggacagaggtggttcaagaagatggggctgtttccagctccccatgcagggaccaggcaggagaggggaggccaggctgggcctgagagggtcagccccacagagggagtgacgccaagcctaggcttacctctccccgaaggctcaggatggccaacagaaacatgggcttgaggctggcattttccagcctacactggcagacttctcactccacaggcaaatcattaagcttaggacgctgcgagctgagtttccctgtggcagctgtggtcacatacagagctttcaggaggctttggaggggtctgcagtagagagccagtgtggctgctgcggcggccctgggctgagctaatccaagactcccaaccccactcagatgctgggtcagctgagcaaagacactgaggttctgtgacctcaggcctcccagtccagggaaaagatggaaatgggggtaactctccagggagggtttcagggttgtctgcccagctgcaggcccagaaaggaagagtgcacagggcttttgtctacctgcagggtgtcttgagtctggcagcagtacccacaggagaaagggaataactcagtggttacaagcaacagcaaacttcctatgtttaactgcatgttctctctgtggctcagtttcttttgtaaaatggggacatcccctagggtttttaaggggattgagaattcatgcacatgaagatttcagtcaatctcaacacatgtgaaaggctcagaaagcataactgttatcacctgggcaaaggcgacaagcacattcaagatcagagcaaagatgcatttctttcctgccacgtgctatgcccacacaagtacagaaccgaggaggtgccctagtccactggcaaagactcccatcccctctgccctgggcagtgggctctgccggcctcctcatctctgattcttcctttcagaactcccctcctctgctgggtacctgctttgttgaatacgttaataacattcatcctgtcactgcttagccttggggtcctgggagtccctgtctcttaatatgactttgcccatgagagtcattgtgtctctgtctttttttttaatttttattttatttatttattcattcattcatttattttagacatagcctcgctctgtcacccaggctgggatgcaatggcacaatctcggttcactgcaacctccacctcccaggttcaagcaattttcctgcctcagcctcccaagtagctgggattacaggtggccgctaccacacctgactaattttttgtatttttggtagaaatggggttttaccatgttgaccaggctgacctcgaactcctgacctcaggtgatctacccgcctcagcttcccaaagtgctgggattaaggcatgagccaccatacccatctgtgtctctgtcttaaagctttaaccctccaagggcaatatgattccttatttttaggataagcatcattccagtgtactaagatcacatttggacctgatttgggcccaactcaataatagcaagagtggtggccaagggagcactcacaacctcctaggtgctgctggaccagtgcatggcagggcggccgcagagcccagcagacctgggcttgatcccgtgccctgccaatgtctgtgagcctcaggcggggaccaccgcaaccctacatggggtcatgagatgagggctgtcatccagcacatggcatccacctgctcaggggtggcagcagccatggtctctgcaaggcttcatggagacagtggcaggtcaatacagagctcttgtcacttggaagtgacttccatttgactgtggtgggtgtgggaccattctctaggcatctgatttctttcccactgtgtgtgtgtgtgtgtgtgtgtgtgtgtgtgtgtgtctcaagcaaacacactagtgtttcctggtcacacagacccctcgctatccacaaagccaccaagatggatggggtttagaccaggatacccctttcacgggggcctgctggagaatagggggttgattggttgtgtatctggatttattttgcagggagggctataaaaatgagtttttaatggaaaatctgaaacatgctactgctatatttagatttttttttcttggggtataattcacatacagtgaaatgctcagctctttagtgtacagtttgtgttcagtgagttttgatatttgggcgtgaggctgttgatcagggtgtccaccccgatggtcagctggggacggtccctccaagcctggactccactcagagccccccaagctctctgcttccctagttctctagacttgatggctcagccttcagcacattcatctctgctgtttcatccaccttcctgggctggggaagcccgaaggtcagggttctgcatttagtgaggccaaggttttcctccggaagatcaaggaggtttgcccttttccgaaatgatcatgatgagctacatttgaccctcatgtagaaccttccggagagtttccactgagatgattgctttgtttaatgtttaccgcaggcctgagagactggccttggctccattttcagataagagatcagaggttgcttgtccacaggtcaaatagctgggaagtgggggagccaagactgagccccagctggctgaccccaaacctgcatgcccgcctcagaactgcactgcgtgcctcccaagaacacggcacagagcatggtgtcgggtgttgggtgtgagcagaacagagtccctgccctcatggaatggacaggctgactccatggccacacccttctccaggggctgtgtggggagtgtccccagtggagggccagaaccaccatgcgctgagtggctgactcactcataccctgctgaggggcatgcccccctctgctggcatccaccaagccaagcctggttgccacctgggccctgctggttcaggaagcccttgtgtcacccacagaccttgctcctctccttttggaaggtggtagtgtgggagttgaggctggaggtgctggaaccagaccatctgtgtccaaaccctggctctgctcttcaccctgtgtgaccttggccaagccatttaactcctctgtgattcaacttccccatctataaactgtggatgataaaataggatctgcttcatggagctactgtgagaattaaactagttaagtaggtaaaatacagcaaagcttagaacatatagtatgtgctcaataagtgttaagaaagatgtaattgttattataataaataataatcataatattattgttacttagacctttggcttggggaggctggatttacaaacctacgattcaccaagagtcttagcagtctgagaggtcgccttctgttaaaaggtggctgctgtagctctagccattgagtccacttcccagaagtggagaaagtggagaaaggtggagaaagaggtaaagccttatttttgtaagagtcattcctcctaaaggacttttttctgcacctcactgcccagaagtgtgtcacatggacaaccctagctgcaagggaagctgaaaatagcatttttagaaagtgggactcattgcttttgcaaactaaaggagatgggctgcagaagggcaagggtctgccccagctccctttgccacctggtatggacctttcctctgagtgggtacaccacaccccctttcccttggggaggaggcccctggggacctgctgcatggcctgccagctggtatcattatcccccctgagggcagcaccattggtaacagttggctccctggggcaggagggccaccgtttcccagacaatgtttacttcctgctaccatggccaagagaactctgctaagtctatgggttttgggcccctctacttagaggcctgagggcactgtggttccccagcgtcagcagaaaggtacccaatcagtctttgggcaaaggccaggagagttttttgtccttgggcaaaggccaagaaagttttctccagtaaggatgactccttcctcagtagctgtcttgcctttggcaaatggctttctcctgtcattgggtcatcagcctgagctgtaccagatgcttaacaaataccatcttcatctcacaccctctagcccagtgccaacaggagagcttcgtgcagtcatggcagcggtctggatctgcactgtccggtaccctagctcctagccacgtgggtgcacgtgaaatgtggctagagaaactgagtttttcattttaattaatttatacgtaagatagtcacctgtggccaggcccagtggctcacacctgtaatcccagcactttgggagactgaggcgggcagatcataaggtcaggagattgagaccatcctggctaacacggtgaaactccatctctactaaaaatagaaaaaattagctgggcgtggtggcaggcgcctgtagtcccagctactcgggaggctgaggccggaacccaggacccaggaggcagagcttgcagtgagccaagatcgcgccactgtactccagcctgggcgacagcacgagactccatctcaaaaaagaaaagatagtcacctgtgcctagcaggtaccatactaagcagtgcagctatagaccctgcccatgaggggagaaacacaaaatcggtagcattcatctagactcataaagagtgggtccctctaagggaacccatgttgtgaaggcccagagagagacagtgaccggcccaaggtcacacagcaacgtaatctttcctctgagaaagaaacacaagtcttccaacggcagcttctttattgtttcttcagaaatgtggttggtcccgtcagtgcagaggggaaggtgagttgtggacacagtgctcagtgtgccaggcacatgtaagcgctttacgcatgtcttatttattcccatctcccccgttttacaggtgaggccaccgaggcccagggagaagtgcctgctggtggcccctgagctggtgaattgagaggctgtgctcttggagcttaggctgagattgcagtaccagggctgtctccactcctggaagagtctgggggatgcgagacctgggcctccatgcccagctggggcagatgcagttagcaagctccgataagcctctctctttccatggagttgtttttccagcctggtctcctaagacttggctcctgcaggtgccgcacctggtgacccgccctggaggctcccatcaacttactcacagcctgactggaggggcagggcttaggcatcaggtacacctgttaggaaggtgcacgcaggaaaaaatctgcctttgccactgttagtcaaagagaaaggcacatggcacccagctccatctcactctctgctctcatctgagtgcagggtgcagagaagaccctggcagatgcccttcctgtgcctgccccgcctccctcctgtgcagtgctcaggcaaagcctgctcccctggttgccccatttcatggtgtcaaaatccccgtgagatgagagtagcactgctggcattaaacacaagatgcccagttaaatttaaatttcagatacgtgctgaatcaatttttaatataggttgggacatatactgaaaatgatttgttgtttatctgaaattcaaatctaactgtgcgtctaggggtgtttgtttggcattactttgttttgttttgcttactctggcaaccctaagtgggtggcatctgtgcagcatacatgacaactgagacccagagaagtgacacgaggcttatgcaaagtcaagacaaggccccggccaggcctgggtttgaagccaagtctcttggaatcctttgccttcttcctggacaatagtaaacaatcttggtggcttccttgggtggttggaagagacccagaagtcactgaaaaaaaaaaaaaaaaaagacccagcacggtggctcccacctgtaatcccagcactttgggaggctgaggcaggtggatcatctgaggtcaggagttcgagaccagcctagccaacatggtgaaaccccatctctactaaaaatacaaaaaattacccaggcgtggtggcgggtttgtagcctgtaatcccagctactcaggaggctgaggcaggagaattgcttgaacccgggaggcagaggttgtagtgagctgagatcgtgccattgcactccagcctgggcaacaggagtgaaactctatctcaaaaaaaaaaaaaaattaaacaaaaacaaacctgcctcttctacctgtgtgacaatggacatactgttagcagtcactcacaccttattgtgaaatagactcttagtgacagccaagcagggaagaggggccctggcaggatggtagattgaagagtattgatcgagaggagaaaattccagccttggcgactgctagagacagtgagctgaggtgggagcaccgaggggtggttggggctgaggccttttataatctgacctctccagccttcctcctgttcttcctcacctggcacccatttcctggtcactcaagaccctccagctttgcagccgcctttgctcacaccatttcctccttccccagtcgcatcctctagggtccatctggaatgccgccaacttctcaagggtgtccgagtgctctgagcagatgtgggcccttccgtgttctgtttcttcgtgtgtgcgtctatttgctggaggcttcttgaggccaggagtctttccttctctctcctggcctggaatgtaggtgggccccaaatgtttacccggaatgagagcaggggcatggccccaaaagcaaacctcctacttaggagttttgctaagagacttgctgcctccatggcatatgagatttggggatcctttgaccgtggggtccaggagcactagcctgagagtggggcctgtctggggcattcaccccagtgcccccgtgcctagagccgtgcatggtatgaggcaggggcctctccatgttgggtggatggagccattcgacagacgttaccgagtgcccgtgatgtgtcgcgcagtcactgtttccagcgctgaagacccaacagtgaaggagacgaggcaggatatgcgattgggccccgctctcggatcctgtgtccaccaagcacgccgctggggagcgagtgagcctccacgtcactacggggttttgtccgggttgcctgccgtgctgttgacgctggacaggagcggagccgttttaggtctcttgaggctgtgacagtgaggctgagacaggctgatgggaaggaaatcatgaagaggggagacgagctcccaggcaggtcacagctctgcggaggccctgaggtgtggcgagtctagcgccttccagaactgagagaagctggcatcctgaaggaggcctcagacagggccaaagaggcagctaatatgctaggtggggcggggaggctgtcggcaccgagtgagatgtgccttgcacctcagaggcgccctcgggcttctgtggggaggaaggactcgggttaggaggagctgggagggcagggaggtgccctgggaggcctcctctccttacaggggtggctgggcccattgtggcctcaggaagtgatgtgagatggatgagggaacaggggctggagttgccaccaccttttcccaaggccgctggtgggagagaggcgccccatcctcagggctcagccctgctccccctctgcctgctccctcccctggacctggctctgcccgctcagcctcgaggccagtggatccctagtagtccagagggttgtagtgccttagagattgccagcaggcactgatggcgagggtagggcatctaggaaagggcagtgcattaccaatattggaccttctctgtgtacatggcattcacggagcacatcttgcataggtacatggagcatttcctgtgtatgtggagcacttcctatgtatacagggcacttcttgggtacatggagcacttcttatatacatggagcacttcctgtgtacatggagcacttcctatgtacacaaggcacttcctgggtacatggagcacttcttatatacatggagcacttcctgtgtacatggagcacttcctttatgaggaggggcacttccaatgcctccgaggagcctcacagccaatgagggttagacccgtttaacagatgcagtgtccgaggctcagcagggtgggacagccaccacatgcctggccggagacctggtgactccaaagctgtgcccccagccacgccccttccatgaccctcgggggcgaggactgtgcaccagacctccagggaatacacatccccttttaccagcagggacgctcctggctctacctgcatgtgtccggtctagccagggctgcccttggcccctcccctggtccctctgtgatctggaatggagggaaggggaaggcagtgtggggaggggaggggaggagtccgtgcagagggtgggacggccaggtggccagcgcaaggctggtgagtgcggcgccttcgtctgttcattctcgagggcagccaggtgccaggtgctgttctaggcatgaggatgcggccatggacaaaacagactcaagttcccgccctcctgggccttacagccagcctgtggataaacagatccatagggcatgacaggcgctgatgagtgctgcggagaaagagcaaagaggaaggaggccggggtgcagggaggcggggcagagtttgtgctgagcttccgccatagcagtgatggacacagacagccctgcacccccacccgcccctagagccaacattgagtttgggaaagagacagataaatacagcatcacacagggcggtgagagaagacccttccacgcaggtgatgtggagtagacgcttgtgtcacaatgaggaggcagccacaggaagaaccaggaaagggtgttcaggtggagggcactgcagagacaaaggccctatgctggaaagagtgtggcatattgtagagagagggaccagtgtggctgcaggtgggaagagggagaggatgtaggcagaggcctggccccagccagggctgcccttgtcccctccccaggtccctctgagatgtaaaatgaaggaaggggaaggcagtgtgcggagggtgggggcggcccggtgaccagcatgcggctggtgagtgtggtacctttgtctgtttattctcaaggggacctgcttaatgaatatttcagtatgtccttccacggtctcctaagtgaggtttcctccttctcttaatgcactctcctaagagttatgcagaggtacacgtagcctggcgcctgtgcacagcctgatcactgcctccagcaccccttagcagttctgttttcactattgcccaggtgagctgacctgggcatgggtgtgtctatccgcccgcaggactgagaagctgacaataccttggttgacacggctctcactttgggaggatggcgcaccttctgggtcgcttcctgaggcaccccacagcctgaggagacaccgtgttctccttggccccatttctggggcctcactgtatgtagggttggatttaagtgctgcagaaacctctgcccacggtgtcaccttgtcactgctcattagaccctattttcctgcaggacagtcaggtgcaaatgcacaagttctgtttgtacacagtgctgagctcctcgagggtatgtgttttgcaaaatgtgttgaatatgcctttctatggctgtttcccaagcatgagactgggagtccaggctgtggagtcagccaggccttggttcaattcccagctctgctatgtactaactttatgaccacctggagttacttaatctctctgggcatcgatgtcctaatttataaaatggggttatgatggtccctgcatccgaaggttttggtggcttaaatgagataatgcatatgaaactcaactcagcatgctgttggctcatggttatgatgctaactcctaagaccgtcggccaccagagcggacactctgagtgcaggacagcggcagtggagtcctcgggagtcgtggtggaggggtctcactaggtgagctctgcagactgtgggtggggcctagaattggtgctgaggctctttggaataaggcagtggcctcccttcacacatgtaggaaaggccctgaatgcagagcaaacaaaaaagccaaagccacctcaaaccatccccagaaaatgcgagtgagcggcagagacgttcctgtcctctaaccctgtgcccttctcccctagtgctcctgcgggaagaagtgtcgcggctccaggaggaagttcaccttctccggcagatgaaggagatgttggcgaaggacctggaggagtcgcagggcggcaagtcctctgaggtcctctcggccaccgagctcagggtccagctggcccagaaggagcaggagctagccagagccaaagaagccttgcagggtgagtgacgagtcagcagcagttccttcgctgggagctcaggccccagggatctggagtcctccccatgcaggggaagtgacgcagatggacacaggggtctcccagcacccacctccagctgtggctgccctgtcccttcttcgagtggaattctgcatcttgtgggctgggtgcagatgccattccttcctccagtgtgaccatcacacattgtccatatggctggatgtgaggtgtctccttctggggtgtgaatggtggatgggcatcttggctggaccaggacgctgacccagcagccgagtctctcttacccagcacccttggggtccttcggtgcctccactcagggcatagtgtggctacgctgatttctctgctggaggacatgtctgtgtcccatgcgtccctcttgctcaccatgatgggctctcctgggcccagaggaaggagttggaagatgacatggtgtagtgtccagggggtctcttgaagacaaggaccacagacccgtaactaccatgtggctggtgtgtcttcagccagaaattgctttaggagatgaggaaaccgctgtccacatgctcagcctggtttccctggagggacccacatccctctctcccgggaggcactgccacattctatggggctggaagaagggtctcagcgggttatttgagaaaggttggaagccatcatgtaacctgtcagtggactccacagtgcttggagaactcaggcatgaaacatctggggaaaacacagcctttggggtctgcattgattctcttaagccccctcagtgtctttgcttcttctagaaaagacaataaagctttgcaaccttctttccacttaccattcactagaacaatgaatcctctttaaaaatgttgtttctgaagctaaagcaggtttattaattaggttaataccatgctgctgtaacaaagagaccccaaaacacagaggcttaaagaatctgtttcttcctttaccaccccacagtgagcatttgaggccggttgggtgtatgtgtttccctgagagaccccagggaaagagccagaatggagggccagagatttgcctttgcaagagcttggtcatgtgaccattcctagatgcagagggttctgggaaatgtagtttctagctaggtggccttgtcccagctaggactctaacagggtaaaagagagaatggattttgctggacagttaatcggctcagtgagagccaattccctgacaaggggtgtgatgtgggcagcaggccaagaaggctatctgtccagtgcccagctgactatcccccagaaagcctgggaagtcctcagctgagggtgagcccgtatccagagtgtcacagcactcttgacaagtgttcttttcagcagtacatgttgctttccaaggcaggtagatgaccctcttcttctggggtcttgtttctggtggggtcacggcggcagcattttgggtggtcttttgaagctgtaatagacattggggtgcattgtggcccagctgacatggcatgcctgggaagtcattttgccaagtaggcgtacttttcctctatgcagccacccggcagtctaggcagatctgtgtgagccatcctccacgcccagcttcccaggatcctgtaatatccattctccttctcaggatggagacccaagtctcgggaatctcccacaagcaagtgctgctgggctcaggctgtgcaagctgttgtcgtttggtcttgccaagctttatcatgtagtggagagtagggactggctcaggaagcagccagatgctgttcaatcacctttcccattctgtgtcccagggacagagacgccaacctccacgtctttgaccaggtacaggattctcacccctatgtgctcttctggatctgcaaggaggagaaaaacctcccttagtggttcctgggcctacagggatggcggcggcgggagttaagcagaggctcacttacactaccatccccagctccttggaggctacaacctagcctctttaaacctacaatctaggatgtacaacctagcctctccattcctgatctgagtgattggacattaacagtggctttgcaggaggttgtgagaatgaaacgaggtaatgtctggaaaggtgatagttagttcctgctgttgtcataatgtacatcctcctccctttagcccacaaggcacagagctgtacaggcaatctttactaactctgtgctgtaagatttcttatccaccaccaaagatctttggccttgcccagggacgcagagatccacccctttgtaggagtattaatataagcaacaaggacttgtcagtattcttgaaaaggaagctttattgagcacctactgggtgccaacactcttctaagtacgtgacttaccattcacctcaatcctgccaggagctagaaaccccatttctcaggtggagacacctgaatgaggttcagggaaagtaaataacttgaccagggtggcagagctaattagcagaagcagagactttttcccactgcacagacacgcctcatcttccctctgggtatggtcgcagggaaggaagttggcccagatgccagagacagaagccattcttacttcagtggcggtgacagcagactcaagtcagatctgggggcttgaatcccacctctaccatttattggctatgtgagcttggatgcatttttttgttgttgttgttgtttacttttttattttcctctaagttctgggttacatgtgcagaacgtgcaggtttgttgcataggtatatgtgtgccatggtggtttgctgcacctgtcaactcatcatctaggttttaattagatatttgtcctaatgctgtccctccccttgccccctactgcccaacaggccccagtgtgtgatgttccccctccctgcgtctacatgttctcattgtttgactcccacttatgagtgagaacgtgtggtgtttggttttctgttcctgtgttagtttgctgagaatgatggtttctagcttcacccatgtccctgcaaaggacatgaactaattcttttttatggttgcatagtattccatgttgtatatgtaccacattttctttatccagtctgtcattgataggcatttgggttggttccaagtctttgctattgtaaatagtgctgcagtaaacatacgtgtacatgtgtctctatagtagaatgatttataatcctttgggtatgtgcccagtaatgggattcctgggtcaaatggtatttctggttctagagcttggatacattctttaacctccctgccccatgattcctttgctgagggtaatagtaacaatgcctgtttttcttataattgggactaataaacagtagctacttcataggattgttgtgaagattgaggtgtaaagtgcatggcctggtgtgtagtaccattagtgccaatactgagatctgcttggagatgttgcttgtctgattctcatgaggggtggcccagacctgagaccaccccttgagcccatccaagctcaaggtagcggcattcctgaaaggcagtgagttggcaccttcagccaccacgagcatcctgcctggaattctacaaagtcataaataagatgcttcaccagccacagcacatggtgagtaaattgcagacagatgcgggcagaaggagtccagggcatggaaagggatttatatgcccataatgaggagagggggaataaacgcacaagccgagcaagcagcagatgttgggcgacgcttgttaacatccagtgtccctaatgtgggaaaaagcagagcccccaaagacttgccccctggcagattctctctccaactaactgccccaccgtctttgtgtttgaatgagacccgaaatttctagcatgtgagaggaacaggaactcaagcaggcacccaaaacatcagtctgcggttacaacacaaaagcaatggaaagaatcttgtttgggaaaaacgggggcttagaagattcctttgtttctttggaaatgagtgtgggaatatttggttttgaattttggtctcatcatgagcttaaaggcagaagcctgaatgattgtttaagacatatatatatatttttttcttttttttttttgagacagagtctcactctgtcatccaggcttggagtacactggtgcaatctcagctcactgcaacctctgcctcccgggctcaaatgagcctccagagaagctggaactacaggcacacaccaccatgcccggctaatttttgtatttttttgtagagacggaggcttgccatgttgctcaggctggtctggaactcctgggctcaagcagtctgcccgggtcggctttccaaagtgctgagattacaagcatgagccaccaagcccagctcatcaatggtatcatcttatgtataaactgcatgagccctgcccagcacatgtggtaagcgtgtagcctgggggacccctttggggtgtctgttgatttcctcaggcctcctcaatttcatgatttctccgcgaatcaaggcagcacagaaacaatgatagtgaaaatttgcttcattcctttttaaatctcttaacagcatgtcaggtgttttgagcgtgttcccacaacaataaatactctttgaaaacataatttttaatgactacataatgttctgccaaatggagataccataatttatttagccgtttccctattattagacacttaagttgtttccactttttttctctctctgtcttttgtttgtttgtttgccattatataacactgtcttaaagatctgtgtatgtaaatctgtttattttcataagacagcatttcttaagctctttggcctgaggaccactttatatctttacaaaactgaagaccccaaagggcttttgctcatatggtttagatctattagtattaatgttttcaaaattaaaactagaaaaaatatgtaaatctttagtaatttattttaaaatcatcataataaatgcattatatgttaacataagtacagttatctttttctttcctttccttttctttttttttttttttttgagatagtttcactgtgtcacccaggcttgagtgcaggggcgtgacctcggctcactgcaacctccgcctcctgggttcaagtgattctcgtgcctcagcctcccaagtagctgggattacaggcacgcgccaccatgcccagctaatttttgtatttttagcagagacaggatttcaccgtgttgcccaggctggtctggaactcttgaccttaagcaatctgcctgcctcggcctcccaaagtgctgggattacaggcgtgagacaccttgccccaccaatatagttatgttttaatgagaagtagctgtattttcccaaacagattcgagtgagaagagcagcattattttttaaacatttttgtaaaactcactggtgtctggcttcatagcagagtgctgaattctcatctctgctccgtctgtctagtgtgattgttgttttggttgaaaatctggcgtacgcagttttgtattaatagttggagaaggaaggattatattaattgccttgttagataattgtgggtgttctttgataccatgctgaaattcagtggtagtttcttgaaggtttgttgcagtgcgcatctgaaacctaatcctttgtactctgctacgttaaaatccactggtctaatttgcactttgaaatgggtattttacccacgtttttttttcttttgagatagagtcttgctctgtctcacccagactggagtacagtggcgccatctcagctcactgcaacctccgtctcctgggttcagacgattctcctgtctcagccctgcgagtagctgggactacaggcatgtgccaccacacccagctaattttgtatttttaataggactgggtttcaccatgttggccaggctggtcttgaacccctgacctcaggtgatcacccgactcagcctcccaaagtgctgggattacaggcatgagccactgcacccggcccccgcatatgtattactggcggaaaatggcttgaacaaaggctagaagactagtctgcacatggaggtgggaagggacacctgatgttgaggctttgatgcaggcagatgatgggcgatggtcacggtgaactcgagggtcacaccagaagctcagggaccttggagcttttcagcaggagtcactatgtgaagtgtggtgttttaggatgtccccattttcgtttccctccctctccctccctttgcagcctggtcactgtccttctggcacatggtggtgtggttacatctgtgtggctcctggatgtgcctatggtatcacctcccttctgtcccctcaaggtctctgcatttgtactttactctcccccagcctccagatggtcactcttccgcctgcttcaggttcagtctccgcatcctctaggcagctttctggaccagcttccctgtccgatgggctcagggcctgtttttggcagaataatgatgtccccctctcccaaagatgtccccagcctaattcctgggacttgtgaatgagttaggtcacacggcaaaggggaacgaagcttgccaatcggatatccctgggatgagtctccggtgggcccagtggatcacaagggcccttgaaagtagaaggggaggcacaagagagagtcagaggagatgtgaccggaggagcagaggccagagggattcaatgtggggccttgacacaccgttgctggctttgaagacacaggaaggggctgcaagccaaggagtgcaggcgacctctagaagctgggaaagacaaggaaacaggctttccccagagcctccagaagaaaggcagtcctgccaacaccagggttttagcccggtaacacccattttagacctttgacctccagaactactataagaacattcatttgtattaaattaatttgtattatgttaggccagcagtccccaaccttttaggcaccagggaccggtttcatggaagacagtttttccacggaccaggtgtccggggttgggggatggttttgggatgattccagggcattacatgcactacatttcttgtgcactaaatttctattattattacattgtaatatatagtgaaataattatacaattcaccctaatgtagaatcagtgggagacctgagcttgttttcctgcaactagatggtcccatctaggggtgacgggagacagtgacagatcatcaggcattagattctaataaggagcacgcaacctggatccctcacatgcgcagttcacaagagggttcgtgctcctatgagagtctaatgccatcgctgctgatcagacaggaggtggagctccggcggtaatgtgagtgatggggagcagctgtaaatacagatgaaacttcgctcgctcgcccctcacctcctgctgtgcagcctgcttcctaagaggccagggaccagtaccagtccatggcctggggcttggggaccccgtgtgaagccactgcattgtgtcactttgttacaacaagaatgggaaacgaaccaggccctctctttccctggacttggcagccctaaacactgccctctctcagggcttaggacacgtgagggtcatctgtttcctttagaaacgcctgcagggcacagcagccagcacggggcgggtggagttagctagcactgactgagcatggagcagaagaaaggatccggagtttcctctccttactggaaggactaaggcctgtgggagccttttccctgccacagagtgagtcacctgccttacactgaaagaaacacaactttattatttaatttgctcattcaccaaatgttccctgaaagcttccctaccccaaagcttgtgccgatgcctgtggttcagagcattccaggccctgctcagagtctagggacatgcctgaaacctacgacacactcagtgtaccttacttgaatcctatttttccaagtggccaaccaggcctgtagatgagagtctatcccataggcattcctgcttcaaggagttctaggctgcagagactgtcttaagtccagcggggtcggtggggctggaagactaaagctcccagcaggtgcagccatgccctggctgcctttgcagatgtcaccaggcctgcagacagtggggtagtaggtggcctgagaggctgttgaatagaacgatgtgtcatctgtgctggggcggccatgcccacttgctttcttagacacacatccttgtcaccacagcactgtgtgggtttgaaaagctacttgatgtttcctgtgtcccttcccacatccgcactccattcttagtctcattccctccatcaaagacgtgttcatcttctatgcagttcatcacctggggttgaatgtgtatgttcctctttagtaaattcatacgcttgaagctactgctgtttctttagcctggtggctctcggggctgctgcagggggcccaccctgagccagcccctcggtcccacagccctgacgtagaagactctttgctggtaaatctcggaactcactggaagcttccacaaagtttaactctacagacagaatgtcttccttacatactaccggctgcttttaaatattgttaacagatcccccttaaaggcttcttagactccacattttgatccagttgataataattgatggtcaggtggaagaattgcccaggctctgttgttgttctgttatagttgccactggacctgctttcagcaccctcaccctggctgcttcagagggcagctggattcctaaaaagaacccatgccctaatgcacaagtactttttattttattttatattatttttcgtggggggacagagtcttactctgtcgcccaggctggagtgcagtggcatgatcttggctcactgcaacctctacctcctgggttcaagcgattctcctgcctcagcctcctgagtagctgggattacaggcgcccgccaccacgcccagctgatttttgcatttttagtagagctggggtttcaccgtgttggccaggctggtcttgaactcctgacttcaagtgattcacctgcctcggcctcccaaagtgctgggattataggcatgagccatggtgcctggcccacaagcactttttaaaaataattaataatcatcatcatttaatttgagagtagtttgaggtttacagaaaagtttctaagatagtacggagcgttgctgtatacccagtttccccgttaagatccttcaattaccttgcacaagagccttaaaaccatctcttgtgtcgtgcttgctgatatctcattggccaaagcaagtcacctgaccaagccctgtatcacgtgggcggggctctgcaaggccaggctccttggcaaccccgtgactcacagtccaacacagagatccttttaaatagaattgtttccagaacctgccctgaagtctggggttctggtgactgacagtctacacatttgcaacaaactttgtcccctttgctttttatgcagtaattttttttgcacccgaggaactgatgttctcgtcctcatctggggtttttagcactgagtccttgaccctctgtgagttgcacaggcagccaggacggcgccttcccccaggcgtccctgtcccccacacagcctccctaacatgtgccctttccggcgtctgcttcaacacttggatcagcttcttagtagattccgtgatgtcttaaggttctaattatggaagtcttccatttatcctgagaacaacggaaaggctggtctgtttgcaaatgcacagacaccctctagcactcacccacgcccatctgatacttgttttggaaacatttaccagagctcaactcttctgtgttctggggaggggagattaagcccattttgtagttgggaagactgaggtgtgaacacacactgcatcactttggagtgataatcatttcggctagcatgtatttagcacttggaatttgccaggcactctcttcattcctttgcctgcgtgagtcatcagtcctcccaacaacccatgttcgatgggtagtgttagcctcagtttccccatctataaaatggggatgagagaggttaagaaattcttctggccggatgcaatggctcatgcttttgtaataccatcactttgagaggccaaggcgggcgaatcatgaggtcaggagtttgagaccagcctgaccaacatggtgaaacactgtccttactaaaaatacgaaaattagccaggcatggtggcgcgtgcctgtaatcccagctactcaggaggctgaggcaggagaattgcttgaatccgggaggcagaggttgcggtgggctgagattgcgccgcggcacgccagcctgggcgacagagcgagactgtctcaaacaaaaaaagaaaagaaaaagaaaatcttctacggccttctagctagtaggttttggagccaaagcttgatccctaatgagtctgttttccaaactgattttcttcatagatatttggcaggtacttctttgattctgaggttctcaggggtgatcacagcagaaaagaggaaaagagtgaaatagggaagagaggagaaagaggagaggatctggaagtgggtgtctttcagaggcccccttccctggaggcaccaggagttgtttttttttttttctttttcttttttttttttttttttgagacggactctcgctctgttgcccaggctggaatgcagtggcgcgatctctgctcactgcaagctccgcctcccgggttcacaccattcggcaccaggagttttaatgcattctccgtcttcgctctgaaaatggtccccgggaagaaaggctgcaaggttgctctcttggccacaccagacagaagtttttcttcccacctcctcccagtctcgtcctccttcccctgcagggcattgagcatgctccagcccccggaaatgccagtggtctcggctgcagcagaggctgtctttacggtaggggcagaggctgcacacgctgatcctcagcttttaattaatccacccctccctggccccttcccaggaaaggtcagagatggattctgcagaatgaggacaggactcggtgtgcgtcaagccaggctctccaaatgcctttcagaagaccttgcccaagaccccattaaattttgcttggagcatggcctccatcactgtgcaggtcttcatgcctacctggccatgacagggtcaggacatgaccttgaaagtgtggcaagaaaacgaaagccacgctggcctccatcccaggagaagacctttggtgtgagcaggggagggtcatcttcagagttggcctcagaggcagtgcagggcactcttgctctgcggtgcctgagcttggctcagttgagcacaggtccaaggcggctgtggacacaggatcaagtctgacacaggccttgaccctgattcacctcacccctgcttggctcccaggggaatgcgctgctgacctcagactgggaacttttttttttttttttgagttggagtctcactcttgtcgcctaggctagagtgcaatggcacaatctcagctcactgcaaccctgcctcccgagttccggcgattctcctacctcagcctcctgagtagctgggattacaggcacctgccaccacgcccggctaatttttgtatttttagtagagacggggtttcaccatgttggccaggctggtctcgaactcctgacctcaagtgattcgcccactgtggcctcccaaagtgctgggattacaggcgggagccgctgtgcctggccgtgagctctttttgtagagtagcccctgctcgtggtcagtcagcaaaggaggtagcagggctttggggtattgaatgcaacacaggagagggggtgtggggaacagggactgcagtttcactcagatttagcaaaacgtatcgagcacctccgagagccggccctatcctgagcatgccatatgccttctcttcacattatccccagaacaaccccatgacatagatggggtcaccctgcctttacagttggggaaactgaggctccaagatcgtacagcatgcgagtctcagcatttggatttgaagctctgtgtctgacacagatccatcaatgctgcaccggtgctagttttccatcaatagacatcgttttaatgttactaaaatattactagaatcccactcattcattcagcagatacttgttgaagtcctactgtttgccagacattattctgggcacttggggtttatctgtgagcatgttaggaataacgctcaaaatcctaaggaaactgaacactcaaacaaaggattcttagcaaagcaattgtacttctgcgcagaggggtacctccttggccagttgccatgagagcacacctgaacaaaggggcacgagagcctttattcctgatgcaagtcctgcccctgtaccctttccccactggccggggtcatacaatctaaactaatcccagttgactgaacatttgatttttttttagatagggtgggcatgtaaaagaaagtggagaggaaggggaaggggtgtctgtaatgagctagaaagttagtcctctttccaaataaggaaaggaatgtgagctggtactgataacgcttggtactgtggcatgcctgggcatttaacaaaggcaaggaggaaaaaaggagaagaaaaggggggtggtacaatgaattaaagaataaaagattgatcagattatttgaagagaaacctcatcatatcccacagcagaattgacaaagatccatttcttgtggagattacattctagaagggtgcaccggttactactgctgtgtaacacactgcctgtaaatcttagtggcataaagcaaccaccgtttttcttacatctcatgatcttgtgaatcagggatttggcagggctcagctaggcgattcttaggttctctgtggtgtcagtaggggtacttccatgctattcctctggacgacccaagatggcttcactcacatatctggtgccatggcaggatggctgggctaagctgggtccggcaaccacatgcccatttgcagccccttcagcatagtagtcagactttgtacatggatgctaagggctcccacagagagggctccaggaaaccaagtgcaagctgccaggcttcttatgacctagtcctaggagtcacttagcatcacttctgccacattctgttggtgacaggccagccagaccccacactataaaaggcatgtggcatgggagatgcatttgtgtccagctttgcaaaaataccatctgccatggagggaagggaaaaggcaaacaaacaatatagcaaaaagtaaatgtatgctgttttaggggattgtaggtactatatggaaatgaagattttaaagtagggtaagatcagacccagctgctccactcctgagtgtttactcacctaggaaatacacatccatacaaagacttgtacatacgtggttttagcagcttatttttaatagccaaaaactggaatcggcccaaaggctcatcaacagataaaaaaataaacaaactggtaatattgtacaatggaatcctactcagtaataaagcaacaaactgggtacatataacaacatggagagatctcaattctactgagtgacagagtccaggggaaaaatgtatataggatatgattccatttaaggagactagaaaatgcatgctaatctacagggacagaaagctcctgtaggaacgtgggcttattgcagagggtaggcagaaactgggtgatgggtattttcactgtcttgattgtggtgatagttttgcaggtgtgtacatatatcagagaatgtcaaatggcacatgttaaatatgtacagttcattgtattttatttaaaaccaataaagctgtttttagaaggaagtaaggtggatttggagtcctgcggatagagcattgtagggcaaggagcattttagaaccctgtaagtcacatcagtggggtggcctctggctttgccttctttccctgtgtgctggcctcagcaggtcacagaggggacccggccccagatgggcagagtcctcgaagacaggcagactgtgccagccagctcctgggtgagggaaagagcagagagtctgcagagctccaatacccagggctcctgggctcgcattccaggaacaggcagagaccagcaaggtccaaagctggatgtgctgtggcttgagctcccgcccaactttttaaataggtctgaccacctggcccagctagaggctgagacataagctcctgatagccaggcaggctggacaggccttcatgcctggagcctgatgttggagcagaaggagaggcatttttcttggcacccagctaaaaattcagaccagcttagagaggaacgttctaatttcagcttagggcctggtgctatggctgggaaaagaccaaggttaaaattcaatgtctccatgaatataatatttttaaaaataatctttagatttaaggtatatataattaataaagtttttatatatttatggaatattggtatagtccaggcatgcatggaatataaattccacagatttcctcccagcagccctgtgagttgtttttcccattttgcacatgaaaagattgaggcccagagacctgacctactgggaggtggaaattaaagcaaagaaggtggccgggcacagtggctcacgcctgtaatcccagtactgcgggaggccgagatgggcggatcatgaggtcaggagatcaagaccatcctggctaacacggtgaaaccccgtctctactaaaaatacaaaaaaattaactgggcgtagtggcgggcgcctgtagtcccagctacttgggaggctgaggcaggagaaaggcgcgaacccgggaggcggagcttgcagtgaaccgagatcatgccactgcactccagcctgggcgactgagcgagactccgtctcaaaaaaaaaaaaaaaaaaaaaagcaaagaaagtacactcagctctcagacctgcgcggtgagcccgcacactgcacagccgcacactgcgagcctgttgctgttggttttggacgtggctaacagttttttattttatattcattcatttatttgagacaaggtctcattcctatcacccaggctggagtgcagtggcataatctcggctcactgcagcctcaacttcctggactcagatgattctcccatctcagcctcctgagtagctgggactactcagaacagcacgtcatcaggccaggcctactgtggaggccagtcactcttgccccggccacaagaaggaccgcaggacttaggcctgagtgctcacccggcagcacagaccttggcagcccctgaattccggaggaactgctcactcacaggccctggaccatgacgacccagaacatggttcagactcaggcccttccggcagagcacattgcccgagggaagaaagtggtcttagcgtgaacccatgggttccagcagaaatgcgtgagccggatgagcccacgctgcccagccccagaggaggccgggaggggcttcttggttggtttggcttcttggctgacctgcgacgaggcccaaccagatgggcattggccgtcctgggacatggactctccccctgggtgcccagcactgggctgaagaacacacggcagggcgctcaaaaactgggctctaggcagggcgcggtggctcacgcctgtaatctcagcactttgggaggccgaggcgagcagatcacaaggtcaaggagttcgagaccagtctggccaacgtggtgaaaccctgtctctactaaaaatacaaaaaaattagccaggtgtggtggtgggcgcctgtaatcccagctactcaggaggctgaggcaggaggatcacgtgaacccgggaggcagaggttgcagtgagccaagatcgtgccactacactccagcctgggcgacagtgtgagactccatctcaaattaaaaacaaacaaacaaacaaacaaaaaactgggctctgctgaaggcataggactgaaaaggccatggagtcctcggggcggtgattcccctgggaggggctgtgctttccccctttgggctggaggccctgagggtcaggacctgacggtgtctgtctctgtccttcagccacaggattgctcctgtccccgcagctgggtgagtaagcaaggctgggaaaagagggacgtagtagggacaatttgctggccaggacctcaggatggcactgggtaggtgctcagggagtgggtgaggagctgagggagcactcacaccctcaggtatgtacccatggttccatcccagattccggaaggtcaacgtgccccgaccctgcctttctggtcgtgtggcctgtcagccctgtcctgggcactgacctgtgtctccctattatgtggccaccagatccacctgtggaatgcacctctgcagtgagtgtcgcgctctgctgcctctgagtcagctggagaattcatgtgcctgccgaggttggcaatgggtggcatcagtggagagagaggaaaggcacacttttttcttccctgtagttcgggtgactgcagattgcgggagactcacttccttcaggtgcagaatgggctgggacagccctgggtggcgcccaggagagaggtccaccaggtggctctggccaggtctgcccacgaagccaagcagttttctggtgggagctcccagcctctcactcgcttgcctgggcagggctgactgttggccgttgtctcttaagccttgcacctgctgtggggtgcacgtctttttttttttttttttttttttttttgaggtggagtttcgctcttgttgcccaggctggagtgcaatggcacgatctcggctcactgcacctccatctccctggttcaagcgattctcctgcctccgcctcccgagtagctgggattacaggcatgtgccaccaagccctgctatggggtccatatattgagggcagagtttctggtccaggcgaacgctccctccccgtggccttcctcacgtcctcccattcccagctggggctggttcttgctaaagacctctttctttccttgggcacatgcttgctggcagggcctgaatcagagcttttcttcaagatcttcatggctcagatgggtgagcaacttcagcccagccttttcgagctgccaaagacagtggatgtggtttgggagcaacactcttaagccactgggaccagatgaagagcagagtctggctggctgtgttctacggagcatctggattgtcaaaagcatccggcagcttgagggatgtgatggtggggaggagggtcgacatgtggtcttgttgatgggactgttgtgtccttcttcagaggagaaggtggtcaacagtaggccccacattttacctttttggggatcttgcagaccgacctgggaagcccctgaggcagtcttcttctttgttcgtttctcttaatctgatagaggttcttcttcccactcttctggaaattcaggtccccacccctgggctgcagagggcagtttcgtgttggtcactactggccaccgagcgcatctcagcctctgtgtgctatgggggctgagtgtgtgggtgtggtcttgctctcctggaagatggggggctttgccaggcagaggcagtctttctgagctgctcctagaagggggtctgacgcccagacatagccgcctctgctgctattcagagtctgttaggagtaaacggggaagacagtgaataatttggggataggaggtacaggaagagggcagtgggagggaggttttggggtattttttgagacggagtcttgctgtgtcacccaggctggagtgcaatggcgcaatctcggctcactgcaatctccatctcccgggttcaagagattctcctgcctcagcctcctgagcagctgggattacaggcgcctgccaccatgcccagctaatttttgtatttttagtacagacagcgttcaccatgtcggccaggctggtctcgaactcctaatctcaggtgatccacctgaggtaatcccagcactttgggaggccaaggcgagcggatcacgaggtgaggagttcaagaccagcctgaccaacgtgtgaaaccccgtctctactaaaaatgcaaaaatctgctgggcatggtggtgggcgcctgtaatcccagctactcaggaggctgaggcagaagaattgcttgaacccaggaggcagaggttgcagtgagccgagatcgcaccactgcattccagcctgggtggcagagggagacttcctctcaaaaaaaataaataaataagaacaaatataaagtgagcccagcatgctgggccctgcaatcaattgatcgtgaggtattcctgagctcatgctgtgtcctggagctatgggtccccctccccgccaacgcacctggtctttttctggaattcaagcaggtggctcagagaccaccacatgcaaagcccatccttgggggcaaaggcttccaaggatggggaggcctccatgggcttgggtgggtaagctcaggggaaggggccctgaggacttgtggggaggcagtaatgatgtgatagacattggaattgatgttcctgagttcaaatcctgcctcctcttgaacttgggcaagttgctgaacttgtgtgtccccactggtattacgggattataatagtacctaccccttggttgtgaagattaaatgagctgattcatagagtttagaacggtaagtacctatttattttttattttttaaatttatttacttttgagacagagtctcgctctgttgcccaggctggagtatagtggcgcagtctcggcgcactgcaacctccacctcctggattcaagcaattctcctgtctcagcctcctgagtagctaggactacagttgcaagccaccacacctggctaatttttgtatttttagtagagatggggtttcaccatattggtctggctggtctcaaactcctgacctcaggtgatctgcccacctccacctcccaaagtgctgggattacaggcatgagccactgtgcctggccataagtacctatttattaaagaccagctgtttactgtaaatattttactaagcttagagtggccgtatcatttgttgtttaaactgggagagttttgcaagagaagagggctctattaaaagttgtgttgggagagtgggagtcaacagggatttcccgagacagacaggatctgtagccttgcccagtgctcaggatctgagtaggcaggcaggtgtgtcaggcaggcatcccaggtcaggggatggcataggcaaaagtgtgcaggctggacgttcgtgctacgcgcaggtgaccatgaggcagccttggggcccacctgcccccctggacaggaataggaacatctgtccatctgcaccccgactccttgacccagaaacacatcctcgactctgctccaggctcatctgcatagtccaagaccgtctgcctgttcagcatcgtgatttgcgaggacacaacaggccccattctgttttttatggacctgaaaaagacatgatctttaccatgacagagaggcagggggtgtctcggaaaccattccgatgccatgatagacggcaggaagccgaggcagagaaggaagtggttaaatcgtggagcacatcctcagttgacaccaaaggaacaatgctttcagatcgaggcctcaggaggaaaaatgagggaggcaggagggggaggtggggtggctggaggaggctggtggctcctagactgcgtgtcttcagtgtgagcccctgcaagagcatgtgacgccctgacaaggcggcgtaaccaggcaaccgtcattactcatccccatggccactgggtcttccagtggagcaccgtgctcctgggggtcagggctccccagagggacagggcagcctcctctgcagaacagcggggcctgagagatgccaggaaaacgtgcttgctccaagaagggaggggagagtagttaggagctggaggcccagccttgccgggaaagtggtgtgccacagcatagctgggagctggggcctagctcccaaccctgaatgcttagtggggtttctcgctttttgctgtctctgttcctaaaacggatttttaaatttcaagtgcgtgcttgacccagtagcacagttctgtgcattaaagaccttagcccatgaagcatagaccagtcttgtgtgttttgtaaatccatgttttttaggtattaacagaactcccactagcttatatggagtttttatgcaaattggaaaaaggtacccactctgtgtagacagataaggaaaaggtgctcttctatcattgaacacagtcctatgcaaccccatagcctggtgatcaggcagtggtatctgcatgcaaccccatctctggggggttatagccctgtggcaggtttgctgcggaagcagagagatgcctcctcctccaggttgccggagccctgcgctaagctgcacaatatgacaaacacaatactggctgcatttcagcttccacctaactcacctatcaggcacttttgggcagtacacaagctgtgcgactgtccatggcagccctgggtataagtcacggccatccttgctggttgtggttggcataaggagcaataccctctggatttcatcttaaaagaatttaaggaagagaaaggggatgcagtgccttttcaacataccctgagtttgttcaaactaaagacatgaccatgccccaggtatagcgtgccatccagggcacctttctcacttggagaaagtgagaggtgaagcacctgttaggagggacttaccctggcctgtcagctgtgatctaaatgaggctgtcccctgcatggagttaacgtttgcctggagagcctgtgtgccaggctgtctgcatacgtggtcccatttgatcctcacagcagaccggtgagatgggtcctgttatcatgccgactttacagttgaggtcactgaggctcagggctggaaggaacttgcagcagacacacggctggcaagtggaggagccgggtcagcactccggccgttccagcccgcgatccacacgcctgaccactgtaccttaaagaccaaacccctgtctgttgacacctgaagtttctctgagcctttaaaacgtggcctttgggtggatgtgggcgggcttgggcatgggacagggcatgggacagtggttccccacatgttccctctgaactggggccgctgttctcagcacctgagattttttttttttttttttttttttttttttgagatggagtgacactctgtcacccagtctggagtgcagtggtgcaatctcagctcactgcaacctctgcctcccaggttcaggcaattctcctgcctcagcctccccagcagctgggactacaggcatgcgccaccacgcccagctaatattgtatttagtagagatgcggtttcaccatattggctgttctggtctcgaactcctgactttgtaatccactcaccttggcctcccaaagtgctgggattacaggcgtgagccactgtgcctggccagcacctgagatcttgaaagggatccaggcccctgtgtcagccaggagccggtgaccggtgttgtcagggaagaccagaggcctagtgctggatcttcccactgcctgaatttccagatatcttcctgtggcccgagagcctgccatgcgaagcgcaggtgctgaccaaggagacagaggtccccattagtaaaggtagcccgcacaggcatcctctggctggaacctctccacctcctccttggagcaatgttgagggttgagggagctgccggccccgcagcagacgccctgcagcttgtccttgatcatgacagcaaaaggctaacaaatcgcttttgcctgctgaaggcagcaggggggctttttattccagaaatgagaagggcatgcctctgaggtttctccagagacccaaagcaccctttcacccatccgcagtgccagaatttcatctgagtattgtctgcctgcattgttcacaccaaggttcatgggcggggtaaggctgtacaccccctacctccaccccggcagggatactcagcttagcaccttcaggatgggccccggacttgacgctagagccggagccttggtcctaggattggaagtgggcgcagtagattcaggcagtcatcgaaaacgcaaattaaaacaaccctgagatatcgttgctcgcctatcaggttggcaaaacccctaaagtacaccagctggctcagctggcaagcctgcaggaaaatagcgccctcacctgtggtcggtggaaatgcaaagtgacgtgacccctgtggggggagcaaaatcacatatgcatttaccctttgactcatcactgctacttctagggatgtaccttgaggataaaactgcacaaatatgaaacaagtcactgcacagtctttgtaggatacattctaaagcctaagagaggccgggcgtggtggctcatacctgtaatcccagcaccttaggaggctgaggcaggtggatcacctaaggtcaggagtttgagaccagcctggccaacatggtgaaaccctgtctctactgaaaatacaaaaataagctgggcgtggtggcacgcttctgtaatcccaactactcaggaggctgaggcaggagaatctcttgaacccgggaggtggaggttgcagtgagctgagatcacgccattgcactccagcctgggcaacaagaacaaaactctgtcccaaaaataaattaattaaattaaattaaattaataaagcctaaaagaatgggaagcaaattttgaagtttatatagatttgtaggcagtgctttggagtagtaattctgaaattattttgtgattacagagtagagcaaatgtggctgggcatagtgactcacacctgtaatccaagcactttgggaggccgaggcaggcagatcacttgaagtcaggagtttgagaccagcttggcaaaactccatctctactaaaaatacaaaatgagccaggcatggtggtgtgcacctgtagtcccagctagtcgggaggctgagcatctacatgggaggctgaggaatgagaatcacttgaacccaggaggcagaggttgcagtgagctgagatcatgccactccactccagcctgggaaacaggcaagactctgtctcaaaaaaaagaaaaaagaaaaacagagtagagcaaataagtaaatatatactgttaggtaccagggttctctctgtgggaaaagggccttctcatatggaatgggggaaggcggtggattggagttggggccatcattatgctcttttgatggtataaatatgcaattgacaagtcataaccatagaaagaagagcaagaagccatgtccccctgtagcaatgcatgtatctagtgcccacatctctctatttcttgatgccagtctccatcagaaggagccaggtctccttggacaagtggaggatgccaggcatgaggcagtggaaagtaaaatgcaactagagccctttgtccttccagaaagcaagaatgcattcaaagacagatgggtccaaaagacccaggcactggctgaaagggactcctgctggcaaagatgggacaattgaacatccaataaaataataaaagaaatgggtgattcaagggggaaaggagggcctgtaatcccagcactttgggaggccaaggcgggcagatcacgaggtcaggagttcaagaccagcctggccaatatgatgaaacctcgtctctactacaaatacaaaaattagccaggcgtggtggtgctcacctgtagtcccagctactcaggaggctgaagcagaagaatcgcttgaacccaggaggcagaggttgcagtgagccaagatcatgccactgcactccagcctgggcgacagagcaagactctgtctcaaaaaaaaaaaaaaaatggtggggtcggggaggaagagaagagatgaatgctgattaataaacatagagggactgggcctggtggctcacgcctataatcccagaactttggtgggaggccaaggtgggaggccaaggtgggaggccaaggtgggaggccaaggtgggagaatcacatgagctgaggagtttgagaccaggttgggcaacatagggagaccttgtctctataaaacatttttaaaaattagctgggcatggtggcactcacctgtggtcccacactctgggggctgaggcaggaggatggcttaagcccaggaggccaaggctgcagtgagctgagatcatgccactgcactccagcctgggtgacacagtgagaccctgcctcaaaaataaataaataaacaaacaaagatggaatgaaagaatgagaaggcgttaccagtaatggacagacggacattatgggcttcctgatgtgatgctttgagaacacattacctgtgggttcgttggattgaggcagggcagctgacctggactcttccaaaacttccatgtcatgaaagacccacagaagtgccaggcacggtggcccatgcttgtaatcccagcactttgggaggctgaggcaggcggatcatgaggtcaagagttcaagaccagcctggccaacatagtgaaaccctcatctctactaagaatacaaaaattagctgggcgtggtggcacatgcctgtaatcccagctactcacgaggctgaggccggaaaatcacttgaacccaggaggcggaggctgcagtgagccaagatcacgccactgcactccagcctgggcgacagagccagactctgtctcaaaaaaaaaaaaaaaaaaaaaaggaaagaaagacccacagaaggcaaagagaaccttctagattaaagattaaaggacaatcaggagccaggagagtggattgcaacatgtaatctcatttgggatcctggatcggaggggtgaaaaagccatgaaaaccattaaggagatgtttggagaagcttgcatatggacctgcgttcgatgatattattaacatcagtgggtagtacagtaataaaacacatcactagcagctttgagaacctgcagttctcagggcggtcctcgtcctgagtgcttgtcttctgggctctggcagtttaacagcctcgcttttgcaaaacgccacctcaccgttatgtgccttgcactggccaagctctgggaacagatgttaatccttgtttgcagagaggaaacttgtgtacagtgatattacttctctatatgaatattttaatattaaggcagcaaatcccagaaagtgctgacctgctgcttttcttggttggtgctttccaagcagttccgcagtcctgcttggtgccagcctgagccagggctgtgaaaggagtgtgtgggccactgagtacggctggtatgggtctctagcatgacgcccccaaccctccttgatgaggctcaaaagaaccaaaagggaataacctgtcaccttaatttgaggtcacttcaagaaagtgaggctcaattccaaatctaagtcaaagggtcagttgtttgttggggtggagggactctgttggagctctgactggctgccttccctgaggttgacatgggggccattggacaccaatcactgtgcctgccctcacccacataatcagtaggttcccaataagcagtgaatggtcactgctatttttctctatccaatttaatcaaattcacggtagcaggcactctgccaggtgtcaggaacacagatagtcattccagaaatatcaattgacctccgatgcatgccaggccagggctgggcactgagggtatcgagtcctggtgggcagagcaaactgggcagtctcctccagcccaggcagcgtagaggagaagcaaggaataaataggtgaatagacagtaaaaagatgagatggtaatacatactatgaaggattcaaatgggaaggcgcagaagagagtgtagggctgctttgcacacgattgccaaagaagttctctctgggccgggcacggtggctcacgcttgtaatcccagcactttgggaggccaaggtgggcagatcatgaggtcaggagttcgagaccagcctggccaacatggtgaaaccccgtctctactaaagatactaaaaattagccgagcatggtggcgagcacctgtaatcccagctactcaggaggctgaggcaggagaatcgcttgaacccaggaggtggaggtggcagtgagccgagattgtgccactgcactccagcctaggtgacagggcaagactccatctcaattaaaaaaaaaaagttcactctggaacaggagccttttatccaagactgaagggaaggaggcccccggagctcaggggaggaacctgccaggcagggagaaggctgaggacaggaatgagcttcgcgtatgttggggacccagaagccattgtagctggaaagtgaaggatggagagggagcaggagatgaggggaggggcactttcatgcggggctctgcggtcctgggtaaggagtttggattttgtgatccacgtggaaggatgcggggaagccacttgatcggatttcattttgaagcagtcctctagctgctgcattgagaatagatcaggggtgtagggatacggggcccaggccgttggactcttctagcaggacatatgatagacactcaggccaggctgcagaagccacaggacatgctggcaggttagatggaaacagaagagaggagaaaatagcaggagttgggcttgagcaccaggtgcaagtgaggccagctctggcctgagggtactagggagccatggtgggctttagacagggagtgatgggatcaaactggggctttggaagctggcctggggtgcagggtggaagcagggaaaccagtagtgagcaggaagtcctgagccaagaaaggaggaatataaagacaggagtgaggctctcccttgagaggaagaaggagctgcaggcagggcctgcttcctgctcccatttggtctcatgcccctaccccagccctgtctgcaccatcagccccatctcttcctcctcccggggcttcctccgtcacagaacgcgcccctcccctgcgggcagctggccgcattctcaggcagacacggagcccccaggggcatctctgttttctctccccaccctgctggctcagcctgagcaggactaggactcacttaaggaatgagggccgcctggcagctccacccggcccagccctgctggagggaatcgtgatgaagaacagggcagctgcactgagggtgatggcgtgctgccctcagaattgcttttctcggctctaattttcctgatgcgagaaaagccagtaaccccggggtacatccaatagtcaggacatggtgctgattggacttgaaaagtccgtccagccagctgtgcttctgattatccctattcttaagtatctgtttgggctggggctgtcactccactgatgcccccccagtttacaaggatggtccttggcctgggtggcagtcagatggtcagatgtgcggctcagctgcaggggccactgaattgtgtcgggtcatggagaggagaggggcacccagcaaaaaccagctgcaggccacggccctccggggcttctcagccctggcagctctgggcacgcttaccactgcatgcgagaccaccttccttggcctggattcctgggggaggtcctcgcacatgaccttgtctggtagctgcagtttgtccctcgttgtgccacactttgcaccaccaccttcaacagctacctattgaggccccatctaggtgctggtgccatcatggttctgtcttgacatctgggacagcaggctttcctggagcctcatgtacctgccttcccacacaagctcagaggagcagtttagcatttctcagtgactcggggtcaccctgggaacagtcatctttgtactttagaaaatggcagctgggcacggtggctcacgcctgtaatcccagcactttgggaggccaaggtaggtggatcacttgaggtcaggagttcgagaccagccaggccaacatggtgaaaccctgtctctactaaaatacaaaaaattagccaggtttggtggtgcacacctgaaatcccagctacttgagaggctgagacaggagaattgctttaacccgggagctggaggttgcagtgagctgagatagtgccactgcactccagcctgggtgacacagcaagcctctgtttcaaaaaaagaaaaaagaaaaaggactgtcacttgtcttcatcgtcattggaccttctgtcgtccttgatggaggcagtacattggaggggttgagactgtgggctctgagttcaaatcctggctctgatgcacagcatctgcaggaccttgggccagctactcagcccctctgtgactcagttggttcatctgcagtgtgggggtagtagtagaacctgcctgggattgactaagatcatatgtgtgaagtgctcgggatggtggtgggctcccaggaagagccgagtgagtgctgaccatccacctcctcccttgctacctggtctgtagctgcttgcctctgtaggttggaaatccacagctgagctacatcagaatcgagcattgcatgttagacgagagcaagtggtgctggctgcagaaggcgctttgcattggagcagaggagataggcatcgatgtttaaccagtagctgccgtgggctggggtgtgcacactctgtcttgtttgatacagcaactctatgacataggttttatcacattgccatacaggtgaaaaacctgaggccgagagatattcagtaacctgctcaaagccacacagccgctaatccagatgcaggcctgtctcattccaaagtccaaggttgggatctcattccaaagtccaaagggaagggatcagcaaactgtggctggcccttggaccaaaactggctcaccacttgtttttgtttgtttgtttgttttttgtttttttgggagacagggtctggctctgtcacccaagctggagtgcagtggagcgatctccgctcactgcaacctccacctcccaggctcaagcagttctcccacctcagcctcccgagtagctaggactacaggcatgtaccaccatgcccagctaattttttgtattttgtatggagatggggtttttccatgttgcccaggctagtctttaactcctgggctcaagcaatccacccgccttggcctcccaaagtgttgtgatgacgggcatgagccaccgcacccagcctaccacctgtttttataaataaagttttattggaacacagccatgcccatttgtttcacatattttctgaggctgcttttgagcgacaacagcagagtcattgcagcagagaccatgagccccttcaatactgactctctggctcttcccagtaaacccttgccaccctccctgctctggagcacgccaggtcttgggggtcagctgctttctgcctgttatatgttgttatgccccctaaaaattcacatgttgaagtcctaacccccaggacctcagaatatgacctcactttgaggcagggtcactgccaatgtgatgaattaagatgaagtcgtactggaatagggtgaggcctgatctagtttgcctgataaaaatggatcaggggaaatgtagccacagacacccagggaaaacagcaggtggggatgaaggcaaaggtgggggtgatgtgtctgcacaccaaggaatgctggagattgccagaagctacggggaggcctagaacagagtctttctgcagcctcagaaagaaccaacccttggccgggcgcagaggctcgtgcctgtaatcctagcactttgggaggctgaggcgggcggatcacctgaggtcaggagttcgagaccagcctggccaaaatggcgaaaccccatctctaataaaaatacaaaaaattatccgggcgtggtggtgggcgcctgtaatcccagatactcggggaggctgaagcaggagaatcgcttgaacccgagaggcgggggttgcagtgagcctagatcgcaccactgcactccagcctggtgacaaagagactctgtgtcaaaaaaaagaagaagaaaccaaaactcacccaacatgaggcaccttgatcttggactcctgtcctccagagctacaagccacccagcatacaggactttgtcacagtggccctgtcagaataatatcctctgctgttagcctcttccgtgtccttcctaggagcccgaggaatgtgggtgcaggaagtctcactctagatgcctgggatggcctcaccctcagaaccttctagctgcttcttttggatgatcttcaggtcccatgtccttttatttgggggaccatgtgcatggccacacatacccaggtacacctgagcccaaggctggagaggccaggctggccccagggggattggagcacagggattgatgctgtggtgagccatccctagagtcagccctgcagcagattccgccctggaccgccagagcctggtcccacgtgtcttagtcttagctcttcccaggatccactgatgctctaaacccctgacttctggagagagacagaacatgagaggttctagcccttcgactgaggagtatctgtgaatcaaacgcagcagcttccttttgcctggatatccctcggtgctttctctgatggactgtggggtggggttgtcaccatcactgtggcctccagaatacacctctctttgcctggtgtctgtggcttttaacctcattctgttggtcctgggtcactgatggctctgcccagcatgacagtgagtgccctgcacatgggcaggcaccatgagtggcttgtccattaccggggccccagcagaaggccgagcacgtaggaggttcttttctccagaatcacacatgtccctacccgtgagtgtgtgaggagcatctgcaacatgtgacctcctcagggagaagcaggggaggagtcttgaaggaaggacacaagatgggagcactccaggaattaggttctcctgcagtggagggcagacacacctctaatgcccagggagcatccagggtcaggtccctcaccccgtgtgagcaccgtgccagcccgggccaagggtgaggaggaaagttgcagagacaaataggaaccagtcctggccattattcgatgaggacctggggtccaaattgaaagagcagccttcagagatgcaaagcccagtggcccctcctccagggctgttggccaccgctgtgagctcatctctttggactgaaaaacaattggtcttaggaacagcccttggcacctcaagagtagaatgcccaggtacctatctgggagcctttattgtttttttgttttattttgttttgttgagaagtttagccctatcgcccaggctggagtgcagcagcgcaatctcgtctcactgcaacctccatgtcccgggttcgagcgattctcctgcctcagcctcccaagtagctgggattataggcgcccaccaacacgcccagataatttttgtatttttagtagagatggggtttcatcatgttggccagactggtctcgaactcctggactcaagcgatccactcgcctcagcctcccaaagtgctgggattacaggaatgagccactgcacccagccaaaatggttaagatggtaaattttatgataggtatatttttttaccacaatttttttttttctaatagagacaggatttcaccatgttggcctggctggtctcaaactcctagcctcaagcaatttgcccacctcgacctcccaaagtgctgggattacagatgtgagccatcgcgcccagtctgggagcctttgtatacccagcaaaggttacataagcaattaaaaaaaaaaaaaaatcaggccaggcgcggtggctcacgcctgtaatcccagcactctgggaggccaaggtgggtggatcacctgaggtcgggagttcgagaccagcctgaccaacatggcgaaacactgtctctaccaaaaatacaaaaaattagccgggcgtggtggcaggagcctgtaatcccagctactgaggaggctgaggcaggagaatcacttgaacctgggagatggaggttgcagtgagccaagatcacgccattgcactccagcctgggcaacaagagcaaaactccatctcaaaaaaaaaaataatcatcatcatcatcatcagttcaggtggcgtctgcccctagcggaaagaattctaccaagagtctgcagacctggtcccagccctaacaagcagtgttctcggcctgcactctcccccactccccgccgccacccccctgctgcctcgactctcgtctgggaggggggtgatcgcgctgaccctggaggcttcaccctgagagagaaggaaaagaactgggcacttctgagcccaggacttcgcccatcctgggtgctcttgatgtgttcgttgagtcttatgagagaggggtcacaagcccacacgtaagtaattatctcccaaggtcagaggcagaagagagaactttgagccgtaatgacccggatgtgtgtggcattggagctgggcttgaaggatgaggagggtttctttgggtgggcagggaacaggacaggcactccatgcaggcttgtggaagggagattacggggacttctgggtgtgtttgtggtttaatgcgtcctcccaggtgcgacgtagagctcttaggcatggtcgcctttcctgctggggcgacagtgggcatctcatagtcctctgctttgatccctgggcccccaggccatggaagcaggtcccctctgcaagccatcctcagaaggggagcccctggcagcagggcctgtgaattgggtcgggccatggggagaatggaggaggcaccaaggaaagattggctgcaggccgtggcccttggggacttctcagctctggcacctccgggcacacttgtaccactgcatgcaagaccacctccctcagcctggactcttgggggaggttcccacacatgacatttgctgacagctgcagtttgcccctcattgcgccatacattgtaccactgccttcaacaggtatctactaaggccccgttgtaggtgccagtgccattgtgtttctgttttgccatctgagacagcaggctttcctagaggtttgtgtacccatcttcccatccaggctgagaggaacacagttgagcatttctcagtgactccgggtcaccccgggaatagtcacctttgtactttggacaatttggctgcacagtctttttggttttgctttttctcttttccttcctcttgggctgtggaccatcacttatctgttgttcttgggcttcctctcagcgtcttagaggcagtgccacgtggggagtggagaatatgctgtctggttcaaatcctgactttggtgtgtagcatttacaggtccttttgccagggactcagcccctctgagactccgtgtattcatcggcaaagtggggataatcaaacctgccttataagaggaacatgaggattgactgatgtcacttcagccagttcctctggagagaagtagccccccagccctgaagtgacaccctcactttcttcttgcccactctgccatgcctcagacacagcatggagtaggccgtgggccaccaaggccaccactgatgtagtgcttagcagcggggcagttcttgactggcaggaggaggctgagtcagtagggacatggtccttgtgcatttcacgctgggaaggttggctggcccctcgggaagggcagctgccctggaggaagaggggagctggaagagacagagtgtatgtctttaaaacgaggcctgagctctgggcagtgccctcagttacatacctgctgtgatgccagtgctgggccctggccatcctgttccacctgtgaactcacgtgacttttcatggagttccctgccaagcctggcctggcatctgctgctccacatcccggttctcttagaccaggcgctccagggacaatcttcctgggttgtgcttctccccttccctttgctatcataaagagactggtaacaggctgggcacggtggatcacctgaggtgaggagttcaagaccagcctggtcaacgtggtaaaaccccgtctctaccaaaaatacaaaaattagccaggcatggtggtgggcacctgtaatcccagctactcaggaggctgaggcaggagaatcgtttgaaaccctggaggcagaggttgcagtgagcccagattgcgccactgcactccagcctgggcgacagagtgagactccacctcaaataaaaaaaaaaaaaaatagactggtaacagcttgtggattccagcatctgcaggggctcagtgggagcttttgtttgtctctgctcctcaacttgctcttctctggactcttccaaaatgcccctttcgggaagctctctcctgcccagcccaggtgcctttgggtgcctcgcctgatttatatttaccttcatttattctaggctctaaaactggtgaccgacagagagattttcttgagtctgcttggggctttaaacattttcaaatttgttaccaccatttaaaagttggaaacttttacagtgtggatttccaacttgtcctggaaaataagccggtccggccacctgggtcaacagtcagctggacccaagggcggctgccctataagacacctaatgccatcctcagcccgcggccctctgtagcccccagccccttctgcctctggagagggtccataccctgcacagcagacgcgagtgtgcatgtcagtttccaggctattttctcaccgcagaactcactgggccttctgggtcttggctcttcatgccccgcccactccacccccagtgcctggcatcttgaacaggggtcactgggtcggcctttctctttcttgttcccgtgtgtctctgtccacccagaccagcaagcaggatgactcacaccttcccttctgttccctcagtcccttctccctgggtcctgacactggattttaacatattgggttgcttggctgtcccggcacatcatgggggcctcagaggcagggactgtgacttagtcatcactgtatcatcagacccggcacagggcctggcctacagtgggtgccccaggaatgtaggggggatggacgccatgctgagaaagctgccaaattcccccaccttgttctccaaggaggtcccctgaccacacctgcctgcagtggggagaaggcttatggcaacgcgtttctgccgccagcaccctcccacgggcgtgcagatctgacaagatcaggatctgggtctgtgagaggccctgtgtcccctacattctctacgcacgaccgagggccattcttccctcactgccggcctctcccagtccccaggagaaagggctgatgctcccaaaggcaggccacttgcaggaagacacaccacggagcctccccgctcctggtgctccagggcctgcatgtggggcactgggagggagggccgtttgcctgcggccccatgacctcgcacccacctccctgcctgacctcaccgccccaggaagcttagtcacgttgccttttctgttcctcaaatgctctgaggctgtgtgttcccccaggcaccctgtgctttgctgatccctgggcctggagtgctttttttccccagcattccctgatgcctggagttcctgacttctcctcatccttcccagccttagctgaaatgtcacctgctcggagaggtccttcctgaattttccctcacaagatctgccctgcatcccctcccctccagcgagtctcagttccttcatgcatttcacagactctgttttcttttctttctttctttcatttatttatttatttatttatttatttatttatttatttatttatttattttgagacaaagtttcactcttgttgcccaggctggagtgcaatggcgcgatctcagctcaccaaaacctccacctcccgggttcgagcgattctcctgcctcagcctcccgagtagctgggattacaggcatgcgtcaccacacccagctcattttgtatttttggtagagtcagggtttctccctgttggtcaggctggtctcgcactcccgacctcaggtgatccacctgcctcggcctcccaaagtgctgggattacaggtgtgagccaccgcacctggcctttctgttttctttacttgagttcctgtttattggctgtcggctccaggagagcagggagacggtgtctgatgtatccccagcagcctcacacacccagaacaacgtggattctcagtaaatccatgcggaaagcctgtgtggggaagtggacagccccctgagggtggaggagcaggggctgggctgggagttggcagcagggttcagagcctcatggctgatcaggacctgggcacctggggtccactggggcctcacagagcaacagcatcaggtgggcatgatcagatcccacctcagctccgctacttagttgctgtgtggctttgggcaagttgcttaacctctctcagctccagcttccatctgtgaaatggatgtagaactttccaactcatgtatgtgaggaacttgggacagaccacccagacaggctaagcactcaacgagtcactgtcgttattgagcctggttttaatcgtgtttggttttgtcatgaggcaggcaggaagtcgaactgtgggtctgtgcccaggagcagggcaggcctcggacactctccagtggatgggaactgccccagaagctcctcagctggcacagacggcgggggggaggggcagcgcggggggtgctcccctgctgttacttcactgattccctgatggttttcatggttttgtggctaaaagatgctccaaagattagcctgtgtgaaggtttgggaatccgctgcaatatgggagcctgggccttctctgcgtcttctgtctgcatcaactcaaatataggtaaggatgttgctctcagaagacagccagagaaagcccacctgaggcagagaggagaggctgtgtgtatgtggcggggggactttgggggttagaccttgagggttcctctgggtgcagcactgttgcagcccaaacactctacctgaattaactcattcaccctcataataccctatgatggaggtgcttttattgactccacttcatttattttttatttttttattttttgagatggaatctcactctgctgcccaggctggagtgcagtggtgccatctcagctcacggcaacctctgcctcccgtgttcaagccattctcctgcctcaacctcccgagtagctgggattacaggcgtgcaccaccacaccaggctaatttttgtatttttagtagagacggggtttcgccatgttgttcaggctggtctcgaactcctgacctcagggtgacctgcccacctcgacctcccacagtgctgggattacaggcgtgggccaccgcacccagcccaactccactttagactggaaaaactgaggcatggagaggtgaagattccccagcttggtagagcctggattcagacacaggctgtcaggctcaaggacatgcactgccagccaccttgcagtctgactgggaacaacagtcaccaggtatttgtcattaatttaaacattaatttaaatttaaacattatccaggtgtggtagtgtccacctgtgatcccagctacttaggaggccgaggcaggagaatcgcttgagcccaggagttcgagactgcagtgagccatggtggtgccactgtgctccagcctgggtgacagatggagaccttgtctctaaattcatgtgttgagcctggttgcagtttgggtggtgaagtagaaaggacactggtcttggagtcaggtggattggttggaatcccaggtcttactgcgtgtgactttagcccagtgatttcacctccccgagccttcactttcccatgggatgatggccatgctaatgcttcctttgcagggctttctggaggataaagccaggagagcatgggaggccctgcctccaaggtgctcacaatgctccttcattccttttctcccttgcttcctcctacccagtgcgttcagccccaggcattgcctgcccccctccccccgccccgccatccagaccttgaccttggccttgagttccatgaggccttcggaaatggctttggctgctacctcggagggagctgccccgatccacttgcagatcagaatctccgggcaccccttgccagggctttcatgttgttgctttatttcacaagaaccccggcatttgtttagcaactgggtggaatttttagaacttaaaagtaattctgctcttcgaggaatgcgcctgtggatgtaaccccaactcaggccaggcctggacccagagggagtgggcactctgccctgggcctccccacctccacatctttgctccagttgaatgcaggacaccctcagtctgccctgtccggcttgacttcttcccgcctgctggtcttgaccccagggcaggggctggtggggtgggcacaacagtgtcagcctgtggtaagctaaataatgcccgccccccaagatgtccatgatataatccctggaacctgtggatatattatatggcaagagggactttgcagctgtgacggaggatcttgagatgggaagatgatctggattgtctgggtgggccctgggtaatcgtggggtacttatagaggaaggttggcagatcagagagagggaaggagatgtgagactggaaaaaggtcagagtcagagagatctgaaggtgccctgttgctgactttcaggctagaggacagggccagcagccatgggatgcaggcggcctctaaaggctgggaaaggcaaggaaacaaattctcccctatagcctccggtgggagcctggccctgccaacaccctgattttggcccagtgaaacctaatttggacttctgatccttaaaactataaaataatacatcagtgttgttttaagccacaaagttggtggtaatttgttacagcaacaataggattctaatgcacaacccagagcccccgtccctccttggagcacctcattcaaagtagggctgaggaggcacctcggggggtacagagggtgtcgtgagagagccactccaacctgtagccaaatgctgcccggccactgtacccctctgaacctccagtaacccctctggaaagcaaggttcattcctcctagaactgttgggaagaatttttgaggatgggaaggacctagcccagcccctggcatggaataagcacaaaattactcagccgtgtatattgtttgtttctctgctgaaaaaggcagggaaagagggggtgtgcctggcacagtgcttgtacgtttggatcaacattaggcaacctggattcaaattccagctttggccgggtgcagtggctcacgcctgtaatcccaacgctttgggaggccaaggcgggagaatcacttgagcccaaaagttcaagaccagactgggcaacatagcaagaccctatctctaaaaaaatttaaacattatccaggtgtggtagtgtctacctgtgatcccagctacttaggaggctgaggcaggagagtcgcttgagcccaggagttcgagactgcagtgagccatggtggtgccactgcgctccagcctgggtgacagatggagaccttgcctctaaaaaataaataaaaatcccagcttccccaaacccagcaaaggtggtggtgcattgcaggtaaagttctgcaacatgcctgggcgtggtggttcacgcctgtaatcccagcactttgggaggctgacgcgggtggatcacttgaagtcaggagtttaagaccagcctggccaacagggcgaaaccccatctctactaaaaatacaaaaaaaaaaaaaaaaaattaactgggtgtggtgactcacatctgtaatgccaggtgctgaggcacgagaatcacttgaacccaggaggcggaggttgcagtgagcccagattgcaccactacacttcaacctgggcgaccgagcgaaaatctgtctcaaaaaaaaaaaaaaaagttttgcaatgttgctggtgcctccaggccttagtttcctcatccttaaaagggaagagcagcagcccctactccctggactgtgagcagtgcacacagagcactttccacagagcctggcacagggcactgccccatgaatgaagccacccttgttttgtcagctgggccaaattctctccaccctgagcttgaacacgtgcctccttcaactgctggagtgctcctcgcctgtggggtcgacctcacccagaggcagtgtgttcccaaaatgttaatcattgttcagaaggttcgtgaggatcactgtctgttccacgggtgggtgacttaaggtgagaggtggattcttctggcgatgtccctcttggccccacaaagtcaaaatctttttttttttttttttttttttttttttaggtggagtctcgctctgtcgcccaggctggagggcagtggcacgatctcggctcactgcaagctccgcctcctgggttcacgccattctcctgcctcagcctcccgagtagctgggactacaggcgcccgccaccacacctggctaattttttgtatttttagtagagacggggtttcaccgtgttagccaggatggtctcgatctcctgaccttgtgatccacccgcctcgtcctcccaaagtgctgggattacaggcgtgagccaccgtgcctggccgcaaaatcttatgtattcgacggtcacagtcctgttctttctcccagccgaggctggccccagccaaaattcactgatactccctgtggagggcacagaatgtcaaaggggaatcagaacaggagcaattggttgagtttacagagagaaatctgggggtacagcctgctgacgctgttgactccttgactgggccaagagtcaatgggtctgcagccccagaggtgagggcacatagctgcgttgcaccctgagtttttcgtgccatagagaggacagcattgtggttagcaataccaacttggaatcagactgcccgagttctaagcctagcttggccagtgactctctgaatgaccttgggtgggtcacttagtttcccggaacctaagtttcctcattcagaaaaatcagcgtcatcgccatcatcattgtcatcatcttgccaagtactgtcctgagtcttctagatgaatattaaatcttttattcctcaccaaaaaaacacacacacggctgggcgtggtagctcacacctgtaatcccagcactttgggaggccaaggcaggcagatcacttgaggtcaggagttcgagaccagcctacctaaaatggtgaaaccccgtctctactgaaaatagaaaaattagcctggtatggtggtgggcgcctgtaatcccagctactcaggaggctaagacaggagaatcacttgaactcaggaggtggaggttacagcgagccgagatggcgccactgcactccagcctgggcgacacagcaagagtccgtctcaaaaaataaaataaaaataaaaataaacgtacacacacacacacacacacacacacacaaaattgagggtgttcttttatcctcaggcgacagaagggcacagacaggtaaacgaaggcaccaaaggccccacggctgggacggggcagagctgggatttggacttgggttacgtggcactcgttagcctcacaaccttctgccttgggaataatgtcgtggaggtgagcacccccgctagagctttccaggtgggataatgcatgtaaattgcaaaacacagggcgtggatccggtaggcagtgggtgccggttagctgttttcatctctattgctccagttggcagcggctctggtaacttgtgttcaggggtgtgggtcaaaatccactcatccctttgggggccatgaatagattcattatcttgattgtggtgatggtgtcagggtgtctacatacgtcaaagcttagctcattgtgcatttcaaattacaggcaggttatcccataccagtgatatctcagtaaagctgttttttaaaaataaagcagaggtcaaccaacagaacaaaaagaaaaatctattttgcccactgggtttggccaagtgagggccccctcccatgggatagcacccctgtgactgtttttcaggcagtgttctttatgttcacgttctagcatgaaagggagcttgggaaaaggggtgggggacgggcattgccttcgggtcatcagcttacccattccttgtctctcagctcaggatcaccatgaaacctcttacccccactccctgcagttggatactcttccccaggtgtgccgtaaaatgtccctgcctgctgtacccctctcttaggtggagacctgggttcagcctctgtccccaggtgtcactcacagtgtcccctgcccacatacacacacctgttcagctccaggggctgcaggctgcataggtcctggcctctgctgggggaagcataaaaccggtcctcctttgcaccttccttctccaggctttaaaggacatttcctctgattgtcttctgttcttggcaccgtggaaggtgctgggcatacctaggtcaaagacaaagtgaggtgaacatacctggagcctcgtgcactatcagggtgaggaggataacatcagactggccaacctcatggtgctgtctggatgagaacgtcctgtatttcataaactctaaaatgtgcactttttgcattttagcaggtctgaaaccattgcactcccctgtcacagttagttggcagtgttcttccttcctaggtggcccctagattattggtgcatcttatcccagccagcttccagagctgaggacgcccgctgtgcagaagaggctggtactgtgcaaatatcattgcagagtgaaagaatctggagaaagaatactccagagtctgtgggcatggctctcagctttgctactttctagctgttaccatcttggacaagtgaccttacctctcagaacctgagttgcctcacctgtgaactggggacaatagagttgacttcttcagggtgttttgagaatcaaatgagatgatgtgtgtaaatcccctggcacagggccaggcatgtagccggagtttggtcattttgtttgccgtcttcaaggagatgagatggtgtctcactgaagtcagcctctggtgaaaccaagtctggggtcagaggtgcttctggccttgcccttttttatcggatcttgctccacccctagcattaaatggggggttcaaatcctgccttaagcgctcattgaccaggtgagcaagtcacttattaatagatatcatgcctcagttcctaatctgtaaagtgggtataataatagtacccaccacctggcatgattgtgaggattaattgaatcttggcacttcaagcacactcgttgctgggcatgaaccaggcacctgagaatcgactttttatgattgccattattaaaggtgattattcttttgagctggtgatacagaggtaaatacgcccaggttgctattttgagacctcacagcctcatatccattggggaggataatatgcaaaccaagcccaggctgggaatgaggggtgccatggccgaacttcatcccaaaacacatgagggtctcaggcacagagacctgccacgtattttacagggacactttgattgcttaaaatcatccctggttttatttggaaaaaaaaacatgtttttaatccattccacagattctgcctttgcagtttgctgggcatggacccagcccctaggagtccagtctgactcattacagaccacgtgccagtgtttgcaaggcagtcaccgggcaggtgccatctgtcgatgctgtgtgcaccctgctccacacctccccgagactgaccctgccaactctgtcccattttccctgggctccaggttagccagaattgtgcccaccccttcctgttttgttttgttttgtttttctgagtttaaattttaacctaaagggggccgggtgcggtggctcacacctatcatcccagcactttgggaggctgaggcaggtggatcgcttgaggtcagggatgcgaaaccagcctggccaatgtggcaaaaccccatctctactaaaaatattttaaaaataactagacatagtggcacacgcttataatctgagctacttgggaggctgaggcaggaagatcgcttgaacctgggaagcagaggtggcagggaggtgagatcgtgccactgcactccagcctgcatggcagagcgatacaactccgtctccaaaaaaaaaaaaattgttttaacctaaagggcattagtgttggcatctcagcagcaaggaaaccactgcctcctgtattgtttcctttgtgatgggacagacatctcagcgggccgcagtggcacttaacagttttgtttcccgtgtgccttaccgcgacactgggccctgggcagatgtgcaggcagctcttaggatggctggaaacttgaagatcagaactcagctggatctgagccttgaaccctgggactgtgagctgtgtcagagacagttcccacccccatgagacctggggttctggggtattctgccaaacccactcactggccagcccaggggcaccagcaaacataaaaaccaaaggccaagccctttagcatttacaaaacacttttgcatccagtatcttgttgaagcaaaggaggattctcatggccaggagtaagactagaggtagatgacccaggcctctgggccaggggaggtttgagctaaatctttgctaggcttagggaagagaggagccctctcctacctgcagaggtttggtggtcacctagcagctaccttgcatgcagcagcagcttgtgaagttctaattggattggactggatgggagcaagaaaagcccgggccgggctggtccctcctgacagcgagccgggaaaaggcagggtctttctcctatctttcccgtcatcatattttatcccatccacagggctgaggcccacgtgtcagagcggaagcaggtgatcaatcactcattcatgccgcacatatttactgaatacctactatgttccagacactgtcctaggtgccagggatacagcagttgacaaaacagataataaaccagagaaataagtaaaatgtatgatctggtagttggtgctaagtgctaaggagaaaaataaagccaggaagaagggtgggatgcgccaaggattgccattttagaaagttccagggaaggggctgggcgcggtggctcacgcctgtaatcccagcactttgggaggccgaggcaggcggatcacgaggtcagaagatcgagaccatcctggctaacatggtgaaaccccgtctctactaaaaatacaaaaaaactagccgggcatggtggcgggcacctgtagtcccagctactcgggaggctgaggcaggagaatagtgtgaacctgggaggcggagcttgcagtgagctgagatcgcgccactgcactccagcctgggtgacagagcaagactccgtctcaaaaaaaaaaaaaaaaaaaaagaaaaacagaaaattccagggaaggattgattgatgatactcataataccaatcacagctgtatttactcagtaccttcaaggggccaagcccctgctgggaactggacagacactcatgtaacctttggcaacaactctgagagtcagcatgttgggaggctgggcagtcctcgggaaccagagcactaggtgaggggctggaatattatgggtatgattaaccccatttatcaccagtgagctgcagaggcaggattggaacccagaacgggcactccaaatctggcgagggtttttcatgagctaggaatgtaatgttgccactacctttgaggtgcagacattacggtccccagtttggcacactgcactaggctgggaggtgtggagggtgtgatttgagcccagggctctctcaggcctctctgtttcccaggctggccacatctggacccagggagcaggaggaggtcccaggtgggaggctcgggccgagctctggtgggacgcaaggtgggcttggccagccgacccgttgggtagtgggagccctccccttccttcccttcctggtttctgctctgccgggcaggtagctcacctgcccgcctccataacagatgattagcaggcccggcaaagtgggtatctccacagcggaggagactgggaacagcgcactcctcatttccagcatatgcctgcttgctaacaaacctgaatgccaccgcccatttcacttctcggctttgatttgcataaggagttttttcctgatagagttatcagttcatagcatctcccatgtgcaaaagccttgagcccccatcagcacaggaagggagccgtgccgtcacccagccttggcacagaggcggcccctgcgagtgggactggtcagctgcggagtctcttgccaagttctggagcagaaaaatcacctccttcttccttcccttttaaatgaaataactgttttggccttgaggcctgctgaggctcctggaggccttgtttgtcttgaactcgtggcctgcggaagtgggtagctgctccccctggaagctcagcccgaagcttatctccatgagcccagcgcttgggccacacctcacccatccagacggcaccacctcggagtccaggcctcggctgtaagtctgaagcccaggctgccagagtcgtggaggaaagagttttcccaagtggatgagtggccagaagtggcaggtgttacagtggatcctgctggactctgcaggtctcaggcgagcctgagagtagtcggccttgctgctcactggcaggctgaccaaggcaagtcatttaacccctctgagccttactttctcattcatcagatgggaacactggtactcagtaggttgtgtgaggtgagtgagacagctatgatgaggaccgggaatgccctgccgggtttccagagcacttcactgtttgcagagctcttcgcagaggtcatttcatgtgaccctttaaacccctctggaacaggcaggttcaaaggccagaggttatgtgacctgcacaggtgccacagggcttctagccctggtatctggctctaagtctaaggctctttctagcttgtcccgtctgccttccaagttcaaggtctgtgtaaggcactgttactatcctgagagtcagcccaggtttctcaatggtccctgtgggcccaggagccctgggcagaggcggcaaagtcataagaggagcggcaaggctgaggtcccattcccctgccagccacagtcctcaaggcctctcctgcatcctcatcacttagtgctgtttgtttgggctgtaagtagctcagttcctgttattcccccctggacaatcaggcaggaaattcttcactttggtttccttaagaggtcacatacttttctctcttgcagaagtaaataaagcccgtgtgctgagttggcagttttgcacacgagcccgcccgctggggtgagccagcagcccccttccctccagccttagctagccctacccagggggcccaagggcaccaggaaattcgggcagcctactgcccgggcactgactccccaggtggcatcctgggcacgtcctgcaaagacaggaagatttttaaagcacgcccagggttagagcctgggataatgtgccttgaggagactgtgcctgttcacagaagcagcagtcacattcccctcccgcacccagaatcccgacagaagagagggagggcgccatgtgacagtgtgcttatggagaactcaggtaagcgccatcccagctcccagagcacgctgagcaccaggaaggccaggagggttgcctgggaacaggcagacccagagtcacaacgccaagcacctttgcacacatggcaccccttgctcaggctggggaaacgtgcttccacagctgcaatgagcccagtcctcttgctaagcccacagcagttgagagatgtgttgggagaggctgctttgagcacccatgcagacgggacagctgtcagctccatagcaaaggaagagagcgaggacaaggctacagaacttggccaagactcaagctccaccatttggaccactgggcagaggcataaaatgtcttctgctagccttggtggcattttttattatggaacatttttgttacatacagaagtgaatagaataatgaaattaatcccatttacctattacctgaccccaaacattcatcaacccatggccaattctgtctcaccctccgctcgttcctccccataatattttgaagcaaatccaagatgcatcatgtcatctacaaatattgtaatatgtatctataaaagataaggactctttttaagaaacataacctccaaactatcatctcacttgaaaaaatgatcagatactgttattactcaaatttcctattgactcataaattctgtaccttgttggaatcaggatccaaatatccacacagtgtgattagttttaatatctttttaagtctttttaaatctagaagctcttcttcctttctttttttattatccttgctaattatttgttgaaggaaacatgttgtttgtctggtaggttttccagggtctggagtttgctaattgcatccccatggtgtccttaacatgttcctctgtcctttgaatttcctgtaaattgatagttcatctaaaggcttgatcagattcagactcatttctttactgatttttttgaaagactccttcaaaggagatgttgggtcctcctctccaggggcacgtgccatctggttgtcttgcttttttttttttttttttttttgagacggagtctcgctctgctgctcaggctggagtgcagtggcgcaatctcggttcactgcaagctccgcctcccaggttcccgccattctcctgcctcagcctccccagtagctgggactacaggcgcccgccaccatgcccagctaatttttttgtattttttagtagagacggggtttcaccatgttagccaggatggtctcaatcgcctgacctcgtgatcacccaccttggcctcccaaagtgctggattacaggcgtgagccaccactcccggcccgtcttgcttttgtgatattggcagcccaggacctgtgacacctgaatccagacattcagcagaagtagcagagtggcagtgttctcttctctcactcctttttcatggagtagctagaacccttccataaacagacccctccatcatctactgtttgcttacccactggtagaattcaaaaacgaaagctgggtaattaacatttctccctttatttaccagtcagaataatgagttactgcctccactttcattactccattttaaaagcttccatcatcaggaaatggttcaagcaatacatttattgagtttcatgcttaaataggctcaactatttagaaaagtcagataacccaaatgatgtgttcaccaagatagccaagggtgttaagaaaatgtagatattaacgtgttaataaacagagtacacccactggctcagtctttggaggcagatcggagtttgattcctactttgctaatgagaagactgagccccagaggctgggacctaccctgcttatgtagccagttagggtaagagcccaggtgctgcacccaaaagcaagggcagaggtaaagtgatcatatgctcttgttatctctaaatcccagggctcctggctggattgaataagctgtcccctcttttgcttccaaaatgctcaggggtctggcaagatcccagctccgaaggcacaggatgccagtcaccagaacgtgcagccttgagaggtggttgtttgcacttctgcccatttctcagaaatttgggagaggccctcttcccagaggactttccagggatccagccagctcatgctctctctctgactccccctcccccaaccccaaatactcatattctcatggcctgtgttacctacttattgcattgattactgctaaagacttgaagtgtttttgtttctgtgctagcagggtgccaagtcaccaaacttaaagccggtgataaagtttgcccggatgaatgagagaatgaacaaaagcatagaccttactctcttccatttgtatttagacccttctttctgaccttgccataaatccctcgagagcagggaatcttgtgtcctcatgtagccaacactgcgcactcagggttgggggcggggcaccacttagcatctttaggaccaaaaagaggaaggaggagtgggaaggcgggtggtggacgcggccagtccagagcctccaagccccctcctctgtgtgaatgagtttgctcctcccagcaccttcagggctgctggaacttggaagagcctttctgtacaccccccagcctcaggctgcatctgttcttagctgctgctagtaataatggcagctaacaccatgggcactcttgcaggtcccttgcatgtggagtagcctgtgaagtaggagctgctaccattcctcgttttacaaatgaggaaacagaggcccagagaaattaagacactctcccaaagtcacccagctagtgagtagagaacactctactcacaccccaggacttgaacctaggtggccaggtacagaaagctattcttaccacctgctccagtttcctgctggtagagaaaggcctcccagaagaaacttccgctgcctcccatggggacctctggggccaatccacaggctccagacctcagtgttagaaaagttatacctaaaagacccagttaagcccaaatctcccatggtgagtaaggatggggggttggagaacagttggtacctcaccgctgggttgatgcaacgccccacacctggaggcagaaaaagtctccctggctttttgccctaaagctagacaaccccagtttcttccaggccctcaatgcagggcacagcataggaatcaaggagataagaagacacacacagaacatagatcctcttgaaaacctctgcacagaaaataatgggatcatggcccggcgtggttgctcacgcctgtaatcccagcactttaggaggctgaggcgggtggatcacttgaggccaggagtttgagaccaacctgtccaacatggcaaaaccctgtctctactaaaaatacaaaaattagccgggcgtggtggtgcacacctgtagtcccagctactcaggaggcagaggtatgagaatcacttgaactggggaggcagaggttgcagtgagttgaaatcacaccacttaactccggcctcggcaacagaaagagactgtctcaaaaaaaagaaaagaatgggaagcgtcaagctcactccctcccaacccaaggcaccaggcgtggtcccagcgtgtacccagaggctcagccaggttcccagctgggaacagttcttcctgaccttcagtttagctaagctcaggcaatgctgaattgagtgtggctccccagacacgccaggtttccacaggtgtccatggatttgcaataaggcctccctcctgtagactcctctgccttctggcctctgcacctgtacacgcctccactgtggtcactttcagtgcttccgcaaatatttattgagcaccttctgtatgccagaccctcattttagcactgtgggaatagcaggaaacaaaataggaggcaaactactcacccccgtttcgtttatattcgagtgggggagggggaagctagacagtaaacaggtaaatgcaaaacagatgatgtcagatgaaaaaagagcataagaaaaaaattaagtatggaaggaaaatagcactgagggatctggcaatgtgacagttttagagatggtggaaccgggccaggcacggtggctcatgcctgtaatccaagcgctttgggaggccaaagtgggcggatcacttgaggttaggagttcatgaccagcctggccaacaaggtgaaaccccgtctctattaaaaaaatataaaaattagctgggcttggtggtgggcgcctgtagttccagctactcagaggctgaggcgggagaatcgcttgagcctgggaggcggaggttgaatgagctgagatcgcaccattgcactccaacctgggcgaaagagcaagactccatctcaaaaaaaaaaaaagagagagatgggagaacagtacagctactccaaaaagctgatcaggtgactgaggagctgaaggaggcaggagagtgagccacgtgcatgggattggggtgaggtggggcaggggcatttcaggcagagtggatgggaagtgcaaaggccccgtggcatgctagagaaatcgttgctctgcagttcggaaattctttgcttgcctgtctctccatttactcaggaaggatgcttaagtgaacccatggccgagagcctcacagaactggagctcattccggaggagggttttgtcttaggctgagcagaaactaagaaccgagtttgctctctggtccaagaaaagggctgaaattctgcccttggtccttctgaatgagtctcgaatccttcaggccacctctacccaggtacccccagagccatccacacctgcaggattctgggaggcagggagagtttgtctaagaatcagaaatctgtgatttagacctctgattcatttgtgaggaagtgacttttactttctgagcctcagtttctgcatctatgaagggagcccataggttcccaccctgcccaccttgcagggtgcttctaagatgggcaaatgttttctcaaccacagtgctccacggcggaggctgggtatggttatcattgctgctcctgttggttttttgtataattctgtcaccttcttcagtgtcagaccctctccagacctagtggtccccagattaacccttcaagctctgctggatgagcctctcgtggcacggcatttccagcacgttggaaaagcgccctaaaaccctgctccgggcttcttgtgtgggagagcatttgctggcacccatggaactctgccatctgtcactgtccagaaagccttcctcccgggaagaatcttggcacatacctcttgcttagagctaaggaagggcagttagctgaaagctgcaggcaattctaaagggatggtcagacagtcagcttgtggggctgaggccatctgcaattctaaagggatggtcaggcagtcagcgtgtggggctgaggccacctgtcccgccttccgtgccctcaccctgcctggcactggcccagttgttttctcgggtcatgagaaataagcctctggaggctggcgcttctctactgtgggaccttggctgcatgacttcccctctctgtgcctcaattgtcccttctataaaatgggaatcatagtagttaataattatagcaccttcttcagaggattaataatatataaagttttagaacacttctgacacatagtatgaactaaagactgcttttttcaagtttataagaactttaaaaactgaagttttttctttttatttatttatttatttatttatttatttatttatttgagacggagtctcactctgttgccaggctggagtgcagtggcgcgatctcggctcactgcaacctctgcctcccaggttcaagcaattcttctgcttcagcctcctgggtagctgggattacaggcgcccgccaccacacccagctaatttttgtatttttagtagagacgggatttcgccatgttggccaggctggtcttgatctcctgacctcgtgatcctcccgcctcagcctcccaaagtgttgggattataggcgtgagccaccgggcccggccataaaaactgatgtttttaaacatggtttaaaaacaaagctcacggccagttgcccgatgctctgtgcggctggagctgtctctcgggtgaagagtggtcctgaggtggccctctgtggcagctggcacggttgagctgcagggatctggggcttccctccctcctccagtgggaccttctaaggacaaaccgtcagcatgggcaggtctaggacctgagtcaggctggtcacccctttctgggtctgctccacaggtccttctatattttaagggtttcctggtgaccaccatcccttctggtgggcacagtcccccttggacccattgcctcgtctttgctgctgctatcccactccaagccactgtcttgcttcctgagcagcagcaaaaccctgaccggcctacctgtctccacctgtccccaagtccccaatccagtctccgcaaggcagacactgtgatcggagggcagggcgcccccacttaaccccgtccctgctctgctgggttgaacagtggtccctgggtagatacctccacccggaacctgtgcacatggcctcatttgcaaacagattcttggccgatggtgttaaggtgaagatctcgagatgagatcattctgggacaagtgtacttggaagagaagagaagagaggagcactgaggggagaaggtgatgagaagacagaggctgaggtcagggtgacacatctacaggccgacggacgccagggactgtggcgaaactggaagctggaggagactttgaaggggatgtggctctgccacaccttgatttcgagcttctggcctctgaaactaccagagaaggcttttttgttttttgagacagagtctcacttttgttgcctaggctggagtgcaatgacgcgatctcagcccactgcaacctctgcctcccaggatcaaatcattctcctgtctcagcctcccgagtagctgggattacaggcgcatgccaccgtgcccggctcaattttgtatttttagtacagacagagtttcaccatgttggctaggctggtctcaaactcctgacctcaggtgatccacccacctcggcctcccaaagagatgggattacaggcatgagccaccgtgcccagccttgagaatgcatttgttttaagccctcagattgtggcaatgtgttacggaagccacaggaaactgacgcaagtggcttcccacttccctgcagggaaacccaggctcatctgcacaaggcccctccctggccttcgcttctagaaaatactgagctctttgctgcctcagggcctttgcacttgcccttccctctgccggaacattcttcctctcggcatgtatggcagcttctccatccttcaggcctcacacaggtcttcacagaccacgccaccggcggcccaggattctgtttgtttacttctcagcactgacctcagtgtgtatttaaataattgcatttaaataataattaaacatgtgtcatgtgcttgtttgtcttccttgctccaacatagtatccatgggaataaagaccttatctgtctggttgggcgccgtggcttatgcctgtaatcgcagcactttgggaggctgaggcgggcggatcacctgaggtcaggagttcaagaccagcctggccaatatggtaaaaccctgtctctactgaaaatacaaaaattagccaggcttggtggctcgcacctgtaatcccagtcaatcaggaggctgaggcacgagaattgcttgaacccaggagacagaggttacagtgagccgagatcacaccactgcactccagcttgcgcaacagagcgagattcagtctcaaaaaaaaagaccttatctgtcttatttacccagactcctcagctgcagctcagtgcctgagcaagtttttgttgaataaacataaacccttctattaataaggccgtggctaagtcctatttatcttgttcttgacctaggagatgataggttgtcttgcagatagttttgcagatactgtggtcttagttttgtacgactgaatttaaagccttagcattctggccaggcgcggtggctcacgcctgtaatcccagcgctttggaaggctgaggtgggcggatcaccttcagtcaggagtttgagaccagcctggccaacagggtgaaaccccgtctctactaaaaatacaaaaagtagccgggcatggtggtgggcacctgtaatcccagctacatgggaggctgaggcaggagaatcgcttgaacctgggaggcggaggttgcagtcagctgagattgcaccattgcactccagcctgggcaacaagagcgaaactccatctcaaaaaaaaaaagccttagaattctgggggataccccgatgtcacccctataaaccattctcataagcctgcctctggcatgtgatcattagagcaaaaactggctactcctaagagtagtgagttctccattcatggaggtgtgcaaattttcacatatactaacttattgatctttcccatttccaagaaccctatggagtctttagggttctcccctctgatctccctggcttccccccagcctgcaaactcccttttctccccctccatttttctgggccacgctttcagctttttttcaataagacaaatccaagtctatctcagaagtctaaagtgtgtacgtctgctcacacatataattttactatgagatagtttatcagtcctgaatgtatatttagtgacaagcttggctaatctttcatctaattacactcattaacatttaaatgtataatcattaatatatctgagaatggcggtctaaatattttatagaggtcttaattacagtagatttccagtcttgccataaaactctcgcacccctccaattaacgggatggcatcaggtagctccagggccctggctgggggttggtggtggccagggtctctcactttctggttgcaggagaagacaagaaaattgttctctgtgattttttttttgctgccacgcctctgtctgcagccgtcatggggtcccctggaagagggaaaaatcaaagacaggatcacaaaaattgaaaataataattgttgctgcagagactttagggagttgatttaaaaaaaaaaaaacactcctttcttcctctactaaattaggaagtagttgtgggggtctcacagaagtcagacaagcaaagatcacagtgttttgtgaccgaaagggggtctgagatcatggctgggatcctgggccacggtgtctggttgatgctgaatgccagaagtagacagacttacccacctggactggcacaggcgggcagccacagccccccagcagctgccctcccctcccattaacagctgtcttcacacctttgaaatctctgtggattctaaagctcatcttcagatatcgtttccacctgtgaggttgctaggttgttattgtgcccatttcacagagttaaacactgaggccctgagaagttgctggatgtcctgaaggcacatggcgggcgggaggctgagcaggacctgaatccttagtgacctgctgtgagtcccagccagactgagactcatcttatcccagcagccatactgggtctgtgagaggacctggcatgtacctccacaccttccagggacaactggggcctgtggcctccagggtgatgaaaggccttgcagggtgggaccaccaggctccactgctccccactgcacccccattccatgcccaggtccagcatctgccccagccttgctacaccagggactgcctacctggatatgattaagagcagggggctcagaaccagacccacccagcctgaacctggctctgcctcttaccagctgggtcagtgtaatctacctttgcctcagtttcttcatttggttgtttgtttgtttctttgagacagagtcttgctctgtcacccaggctggagtgcagtggtgcaatctcagctcactgcaacctgtgtccccctggttcaagcaattcttgtgcctcggcctccctagtatctgggattacaagcgcccgccaccacgccaagctaatttttgtatttttagtagagacagggtttcgccatgttggccaggctggtctcgagctcctgacctcaagtaatccacctgcctcggcctcccaaagtgctgggattacaagcgtgagccaccaagcccagccagtttcttcatttgtaaactggggagaatgatggcattacctctcaggattgctttgaggaaaatttgagtgaaaacatgcaaggtgtagaataatacccaccccataggaatcactcaataaatgctgactacggctgttactgtggtgattgttatcatcggttatcattgctgttgtcattattagtgctggggaagccaccacctttcatcatgccaagtactgcctggcacctccatgaatgtcctcccccttaactaaccacagtaacacacggacagcgttgtcgtggcctgtgcaggactgagctggacttgaacccaggaccaaccccacagctcatcttccttccccagccccaggggccctggggactcacagtgggaacaacgcctaccttgcccacacctggagctgccctgcctcactgctaccccaggcgggtgtctactgacgtcatggggacccacagccctccaggtgatacaagctgggttaccgcattccccacacactagtcactgttccgagggcattgcatatacaaaaccagtgctatgaggtggatgctgtttctaaaagcttttaattaaaggatcacataatactcacataatacatgaatctcaagtttatatcttggagaatttttacaaactgaatatactgtgtaatcagcacccagatcaagaataggacctcattcgcttcccagaagccctcctgtgcacctttcttgccactatccccctccgaaggtagcctgtcgctgacttctagccatggagattaattctgcccctcttgcatcgtctcttcttagcactgtttacagtatatactcatctgtgtctggctccagaagcgcgacactcggtccgtgtggctcttctgcgtcacgtgtggccatcgttcattcattctcaccaggtcaagccatccaccatgtgaagggatcacagtggctgcggccattctcctgatcaagggtgtctggggagtttctagtttggagcttttacaaatagggccgctgtgaactttttcgtgcaggtgaacgcacagatgcaggcctttcagacatatacccaggtaggaactcttttcattccttttacagatggcaaaaacgctggcatgatgtgacttgccccaggtccccccacatcactctaaggagcggcagagctggatgtgaacccagattgtctggctccgggttctcactcgtgagctctgctctctgcagcctctctcctctcttgtaaacttttctgggaaaaggctgctgcctgcatctgccttcaacaaccctgctgtgtctctgttacgcagcaggggtgagaccagtccatatcactaggcacccagggcagcttcccgatggacagtcttgagtaggacaccaaaacccagagagggtgcctgagttcccaaggccacacagcatgcgggtttgcaccccagtgtcctgcctccctgtccaccggccattccctgctccatgctgcctcttcctcctttctcaagaccgagcccaggccattatcttgcctgcatacgacctcacacacccacacaagcctttaaaaatagtcctcgttgtgtggggcatggggcctgaggctgatattgcatttccagaaatctccatttccccctcccgcttcaacctagggaatgtccgtgttccgggcccattccctgccactatttttagtggtgattgggaggaaggaggacatttcctggactccccttcagaggctggaaaacaaacaccacccgctcccagtcccggcccctcccatttccctcctgctggtataccttggcctcctgtctccctcggggaggagcaggcagtgggggcctgcttcccggggccctccgccctcctggcttccaggtgacctctgagctcttccaggggcagtcctgagccggggtggtggcagggacagtgtgccctgcgtgcagttagcaccctgaagcctgcagagggcccctgtggctccctgcagtccctcttatgacggacactctgtctgcaggtttcggtcccctccctgggaccggcctagctgtttccagccctttctcattggaagccctggctcctggcatctgtatgagttcgttttcatgctgctgataaagacatacccgagactaggacatttacaaagaaaaagaggttggggaggcctcataatcatggcggaaggcaaaagacacttcttacatggtggcagcaagatagagcatgagagccaggggaaaaccatcagatctcgtgagacttattcactgccatgagaacagtacagggaaaactgcccccaggattcaattaccttctaccatgtctctcccataacacgtgggaattaggggagctacaattcaagatgagatttgggtggggacacagccaagcctcatgcatccatgcctgaggcagaggctctccagatggccaggacgggccatgcacccccctccctcccatcacttccctgccctggctccaaacgggtctatccagtggtcttgcagctctgctgagaaccacgcccgcaccccgccccagggtgctgcttccttctcaagagtctgcccagtccagcctgagcctctctggctgttaggcagtcactctgcatggttaaccggagttttgcggttggggagcttttgctctcattcaatacgcattattcaatactattatccccatttgaccgtgaggcaaaaggcacttacccaaggtcacaacaagcaaatggtagggccaggctgagagtccaggcctctgtctgtagagcctggtccctcagccatggatgggcccaagtctctcctgctccctcttccgtggacactcactcaggtcagcagtcagcacccagccgagcccacagacatggctggacttgtgatcagttgccaatgtggaaacattgggagacatttaaggcatgggaagtagccatcacctggagttgggaattttctcaaaactttgggaggcctggcatgactgggccacattcggtcagtcaccccctctaggtggggttggtgttctaggtccccgctcatgcacctgtctgactcatgatccctggtaggctctgtgcacagctgcgggttctacctggatggtcctgggtccctcagctggagaaccagggaaggggcagattaggatatttggaaatggtgagcactgagcctctgacagcctgcttaagcccccaggttacctgttaaccctttcctttacctgccaggggctgtgccgaatgccagctcctagaaatagctgaggcccaggccctgccttcaggtggcctctaggctagtcttaggggtgggtaggtcctgagctgggggtctggtttccaggctgctagtgcggattcctgtagggccgggtagtggatgggcaaggccatgatcacgcttagcatgagctgtgggcttagaaatccaggaacaagctgcattgaattctcagcaggttatggggtaggggagtcttcaggggaaaggaggaggtgcttgcttcagtgaacatttcccacgataaacacagaatacacagtgttaagttggtggccagttcaaaggaaaacaaagaacagggaagggtgtccagggaagaggttgccgagaaaggcatgtttgaataaagaggagatgggaggaagtgagacacgtgggtaggagggggaaggaaggagggccttccaggcagagggaacagctcatgcagaggtcccgaggaaggaggccagtgcatggacagccaggaggccagggcagcttccccggaatgtgagctgggggaggatgggtacaggacctggagacagatcttgggggggtccttgtagaccattggaaggactttgcgctcccccttgatggggacaggagttgtgggagagaagcagagaagtgacatggtctgagctgccttttaaggggacagctccatggcaggattgatatctactgaagggttggaaaaccagttaggagactaccgtgtgacccagatatgggggtgggggtggggacacagcccgggtgggtgagcagggtagtgactgaggagtggtaaaaagggcccaggtcctggtgccatgttgaaggcagagctggcgtggtcggctgattaattgggggtggagtatgagaaaagtttgggggggtggtcaaggaagattccagagtttaaggccagagcaacaggaaggctaaggccactgtgaactgagtttgagggcactgagaagagcagattcttggggactggtcagggactatcttggatgtgttaggtttgagttgcttttagaggttcaagcagaggtgtggatgctctgggctctgggtctggagttcagggatgaggtccaggctgaagcctgtggttggactgaagccaccaatgcccagaggtcagaagggaacagagtccaaaacggagcaggcagaaatgagaggaaaccaggaacacgggccctggaggtcaagcgaagacttgtcatcacctgcatcgcctgctggaggcagagctcatcagatggagaatgtggattcacactcagaggtcgttggcgaccggcatggaaaagccagagccggtcccagagaggatggtgggaaggaaatggagacggtgatacggtcaacccttttgaacatttttgttccaaaaggaagaagagaaatggaatgagagctggagagggacatgggatcaaatgaaggttttctgtgaaagatgtgagagagaattgcatgttccaatgatgctgagaaaaattcaatagagggcacatgccaagtgcaaagaactcagatggtccgaggagcctcttgtagaaaaggggaggcctcagtttccagcggagggaaggcacagcagcagccaggctaatagcgggagagcctggtaggggaagtgaccctcacactcctggacctggggtctcacctctgtgggaagcacaatgtctggggtctttccccagccctgggcaccttaaaatttgagcactctggattagcagaaactttggtccacttgagtcttctcattcctggctgggatgtggacacagttcaccaagcccaaggcagcttaataagaacttcagccatgccgtggccagctccgagatcaccaggactgatgctcagggttctgtcaggaggcacagggaaatcagcatggcctgtccctcccagggagggcaagaggggacaggcaaagaaaaacaagatgtcctctgccctcatggcacaggatcctgctgtccctggggctgtccacctaattcagtcattcatttgaaagtcactatttcctgagcacttactatgtgccaggcactgctgtcgttgtggaggatacagcagtgaacaggacagaccaggtccctgccctccaggaacttaatatcacaggttgggagtggacatgaaaataagtaaactcattaatccttcacttacctttggcccaggtgagggaaataaagtctgctctttcacccttaagcatgctgtttggagtttttttgccaccatctcactggtgtgaatagactcattttctaccagttgagaaaattggttctcacttttttggttaagtagaattgcccttggttccatggagtatgctggtaattggcacagcgctgaccagaatagttctcaaacatgccagccctgatcaggcactactggcatctgcctccctgtcaggggcagagctggcaaacctgccctgtttccctcccgtgccatggcagacatccctaatcaacccagcttcctagggagcctagttgattagtcgtgtcttccctggcgtgttactggaaaataagaagctattccagatatttgcctttcctgccccaggcaggaggttggaagggtcatgctgactaactttccagggtgcacttggagagagagtctatgggtcatctggaaagatcatgggcctgagcgacaaagttctgggatcaagttccaggtcagccacttgttggctgcgcgagccggtcaacccacttcacctcgtggtgagaagataaaggaaattaacattgtggggagcagactgggcgcagtggctcaggcctgtaatcccagcactttgggaggccaaggcgggcggatcacttgaggtcaggagttcaagacctgagcaccacctgatgtgacgagaacctgattaacctttataaagcaggttaaactttaacctcttccgaactcaccttactcatctttgaaacggaaaaaaaaacaaataaactgctgtccgcccatcccaggaccataaatttgtggccttgaacttgctgccctcgactggccctttccttctccctgacctgggtctcttccccggggctctttacttggaaacctgcctattgctcaagtcagcctgtattttctggggcctcctagagcctgagctcaggcctgggagccacggggagctggaagataggaagagaggttaacactgagcacctgctgtatgcagctgagctctgtcctgggtcctgtcacatagagccttgccaggtggagacgatcatgcacagcttaacagctggggatagggaagctcagagaagttgcatgtggggtctcaggccccgcagctgctaaggagcaagtgacaaaggtgaggtctgttgggatttcagaagctaaaaggaagctcacagactccaacaccctcattatgctgggggaaaaccgaggcttagagcgggggaaaaaagcagcaccagaacctgggacccccacccccaactctgaagctgtgtctttctgaggttctcgtctcccaaaatgctcaaggtcagcaccccacagtcactcaagaccagatagcttgtccctatggcagaaatgattcagccctctggatccatgggttccacatcgatgaattcaaccaaccaaggatcgaaaataatttggaaaaaaaaaaaatggatagttgtgcctgtactgaatatgcacaagacatatttcttatcatttttctctaaacaatgcagtgtaacaactacttacatagcatctacattgtataaagtattataggtaatttagagatgatttacagtacacgggaggacgtgtgtagataatttgcaaatactatgtttcatcggggacttgagcatcggtggattttggtatttgggggagctcctggaaccaatgccacacaataccaaggttgactgtactgtcagctgccgtctacagatgaggaaactgaggcttaatcaaacttaggcagattcccaagccagtgcttctttttttttttttttttttttttttttttgagacagagtctcgctctgtcgcccaggctggagtgcagtggcgcgatctcggctcactgcaagctccgcctcccgggttcacgccattctcctgcctcagcctccccagtagctgggactacaggcgcccgcaccactcccggctaattttttgtaattttagtagagacggggtttcaccatgttagccaggatggtctggttctccttacctcgttatctgcccgcctcggcctcccaaaatgctgggatgacaggcgtgagccaccgctcccggccccaagccagtgcttctaactcagctgccttggcctaagagttgggagacctcagctgactctctgtgcattgggcattcttgcctcgtctctgggcctcagtttccccatctgtaaagggaagctgagctagaagaactccgagagcctcacattctgatgggtgtttattagaagttcaagtttgccagattggtttgccaggctttctggcccttacctgcccacccctcatttcgcagaatgtagttcctgaaggttccatgggtcaggaacattgcatggaaaagaaaggggggccccctgctggcagcagctgggatcgtctgacgtggaccgattcctccctcctcacctctgagcgcatgtttgtccagggtacacccaggctggaaatttttacaagagctcctgaccttgcgacatccaggattgggcccacagtggttgtttgtttgtttgtttgtttgagacggagtctcgctccgtcctgtcccacatctgggttaggggctgtggcatccgaagccagagaaggaagaaaggtctgtggtgggagcttgaggacaaactgaatgtcacctcattgtgtacccgacagagcccagaggctcctttgtgtcgtttttagtttgtctccactgggcattcattcctaaagattcagcttttgtgttgtctcggtctttcgcctgggagggcccagctcagagacgtgccatcatcgtggggccacagctgggcccctggttacaccctggtctcaggcatgcatgtggccacctctgagttggaaaaataagtgcctcccacacaccctccctcccacctccagagtccccacattcccaggagcgggctggtctcattccatgatcctgcagggcctgctgggcgtgacatcaccagtcaccatggcagtggttccagtggcttggctgctggaataggacccgcgtgggtgaggccagatgattgggaagtcatgcagagcgctggggagctaggagctgagtcaggaggccagtcccagagaaacacagccatgccttgcaggctggcagctcatcttgcattaggagcatttagggaacaggttttgaaggagagaaaaaagcagagctatgaggaagaaaggaagagttccattgcatcattttcatagctgtgtgtagattttaaattatttcttgggggcccatcgcaccagcctccttgtttgtgtagagttgcagcacctgccatgtgcaaactggatgtcgcctccttgtgtacacgacagaacttgtggcacctttgtgttatttgtagttgttcttcacctggcattcattcctaaagattcagtttttgtgttgtcttggtcattagcctggcagagtccagcccagaggtgggcagagcgaggagcgcccgtggaaaagaaccatgaagtgaagcctcatgggagagggtagcagcatgactcacagcctgccctggtgtgtctgttaggaatgtgctgggctgcatgtaacaataaacccccaaaatattggggtttgttattctcctgctgtaaggcatccccggctgggtggtaccatcggggaccctggcctcttctgtttttctttctcctccccattcttagctcatatcttccatccttgtgctcaaaaaagggcttataaagaaaactagatttcccagtgggcatctgtgtgcatcttaatggccagaactgtgacacctgccgcttgtagctgcaagggagcttgggaaattgaacattttaggtggacacattccccaccaaacagaattggagcatcatggtgaggaggagggtggatggtgccagtgccagccataggtgtgagtttgtctcctctatgagagcgtcagcctcccacaaggcaggaaccacgtctggctcactcctgtcctcacagcagcaagcctggcgtacagtaggtgcttaattgaactatttggggagagccgcaggtcccctcttaggcagaagcgaataatctaaaggcacaggctcagctcttgctctcagagagccccaggttagatgcaggaggcatagcctgcaccccaccatggaggcagcccacacgttgcacacgcaaagccaggcacacgtacacacaccccttggactgccggataaatgataacaaggatggagcagcagggagacccacagaagccacaagaggctgcactgcacccccacaaaggccatttgtgagaggaaaggcctgggaatgccatgttgaggtgctgggggggttcccctcccaaggtctccaactgccaagagcagagtctggagtttggttctcatggagatgtgggtaatgtaggaggcaattcagagcctaggcgggcaggggtcattcatttccaaccagaaagcagaggcatgatttccctgccaaccagagggcagcggtgtaaatcccccagggagcccatgcgacctgctgagtagcagcttctttccaccggagcaggagggcccagtgaggctccaggaagccacagtgatagcatggctggggtcagcgcccctgccctccaggagccactccccaagctcagcagtgctctcctgctactctccagcccgccagcatgaaaccagcctgaaactgagtcaggtacccattccaccccagctgtgccattaaccagctgtgtggtcttcgtttccccctctgtgagatgggatgataaaaatactcacccatgcacctgcctctcctaggagggcggccaggatcccatgcgcatgtgcaaatggaaatttcccattcatcagcgacagcggggccccggctcttccttaaggagccttctgaccgggatgcatctttatttttattttgatttttatgtattactttattttttgagacagagtctcactctgtctcccaggtgggagtacagtggtgcaatctcggctcgctgcaacctctgcctccagggttcaagcgattcttgtgcctcagcctctggagtagctgagactacaggcacacgccaccacgcccggctaatttttgtatttttagtagagacggggtttcacatgttggccaggctggtctcgaactcctgacctcgagtgctccgctcgcctctcaaagtgctgggattacaggcctgagccaccgcgcctggtcatacatctttagatgttgggtcatcttaatatgaggttcaccagcaatgtggtcgcatcatgttagggggcagggcacaaaactagcctagctgtgccggggcctcccacccactgcctgaggcctgcagggcccacccgctgcctggcaggagtgaagcagaagagtcctctttccatggactctaccatcccagccctttaaggttccagcccagcaggcctggaattccggccctggtgacctaagctgctgctcagccaagccaggcaggagaggacagatccagctgtgggagccaggaagctcaaagctggaatttaaacagctgcctgagacctggggtccccactgcgtgggcctcctccccgtggtgacatggcccagctggcctgccttccacctggggagcttatgttggacactgggccaggagctcagatccctcagtccttaggccatacctggtgtctccagctctctcatgtacacaggctgagtctgcaggattggacgttcaggacaagatgggatggcacagtcattgccatcccatattctgccctcagctagccttggggctggggaccctccaggtttagggagcttcaatgtggaggcagcagaacatagggtcgggtgtcgactttggggtcagacatggctgcgtgattttaaacaaatgaccactctggccttgtcaggctggaagtttccagagtcatagagttgctttgcctccctaacccccaccaccacctccacaactccagacacaaggaggctgtggagaggggttagcctcagaaacccctccttggtattctctccaggaaaaggacggagtgctaggggtctgggcaaaggccgtggagcccaccctgcagtcagaggctgccctgagtctgttccgtgcaccaaggagccagcgctgtggggaaggagagtctggaggggacagaagtcatgctgcttccaggcagctactcagggtgtgttgtgttgtgttgtgttgtgttgtgttgtgttgtgttgtgttggtttgctttggtttggttttagagactggatcttgctctgtcacccaggctggggtgcagtggcatgaacatgactcactgcagcctcaacctcctgtgctcaagcaatcatcccacctcagcctaccaagtagctgggaccacaggcatgcaccaccacaatcagcgtattgttttaattattattttttgtaaagatgaggtctcaccatgtcgtccaggctagtctcgagctcctggactcaagcaatcctcctggaagatcccaaggtgctaggattacaagcatgagccaaggcgcccagccttattttgttttgctttcttaacagctttattgacatgtaattcacataccatgcagttcacccattttaagtgtccaattcagtggtttttagtatgttcacagagttatgtatccatcacaataaccaatgtttgaacatttttaccacctcaaaaaaaatcccatactcttagctaccacccctccctccccgatccacccccacacccagcccgaggcagacgcttatctcctttctgtctctatagattttcccattgtggacatttctttttttttttttcttttttttttttttttgagacagaatcttgctttgttgcccaggctggagtgcagtggcgcgatcttggctcactgcaagctctgcctcccaggttcacgccattctcctgcctcagcctcccgagtagctgggactacaggcacctgccactacgcccggctaactttttgtatttttagtagattcggggtttcaccatgttagccaggatggtctcgatctcctgaccttgtgatctgcccgcctcagcctcccaaagtgctggaattacaggcatgagccaccgcgcccagctgtggacatttcatataaattgaatcacataatatatggcctttagtggctggccttttcccttagcatgttttcaaggttcatccatgttgttgcaaatatcagtacagttggcctctttatccatgggtttcacatctatgaattcaatgaactgtggatcaaaaatagtcagggaccaggcactgtggctcatgcctgtaatcccagcactttgagaagctgaggcaggcagatgacttgagatcaggagttcgagaccagcctggccaacatggtgaaaccccatctctactaaaaatacaaaaattagcctggggtggtggtgggcacctgcaatcccagctacttgggaggctgaggcaggagaatcactcgaacccgggaggcggagattgcagtgagccgaaatcgcggcactgtactccagcctgggtgacagagcaagactctgtctaaaaaaaaaggaaaagaaaaaaaaactccggaaaagaaaatgaatggttgtatctatactgaacatgtacagatttttttttcttgtcattattcccaaaacaatacagtataacaactattcatgtggcatttatattttactaggtattgtaagtgatctagagataaagtgtatgaggggattgtgtaggttgtgtgcaaatactatgccattttatataaaggacttgagcatctgtggattttggtgtccacagggagttcgggaaccaatccccatgcatactgagcaatggccctccttgtttttatttattattaggtaatattccattgtgtggatatatctcattttgcttattagtcatccattggtggactttcgagttattttcaccttttgggctctgatgaataatgctataaacatttgcatataagtttttgtgtagacatatgttttcatagctcttggatgtatgcctaggagtagaatcgcagggtcgtatggtaagttgatgcttaatctttggaggagctatcagacttttccaaaagcagctgcaccatttcacattcctgccagcagtgcatgaggattccagtttctccacatcccaccagcccttgctattgtctgttttctatttttagctattctagtgagtgtgaagtggtatttcattgtggttttgatttgcatttccccgatgacaattgataccgagttttttcatgtccctattggccatttcttggagaagtgtctgttcagatcctttgcccattttgtttgtttgtttgtttgtaacagagtctcgctctctcacccaggctggagtgcagtggtgcaatctcagctcactgcaacctctacctcctaggttcaagcagttctcctgcctcagcctcccgaataactgggattacagacacacaccaccacgcctggctaatttttggtatttttagtagagagggggtttcaccatgttggccaggctggtctcaagctcctgatctcaagtgatcggcctgcctcagcctcccaaattgctgggattacaggcataagccaccgcacctgacttcctgtttaaatgacttcctgttctttttattattgagttgcaagagagacttgtatattccagatagaagccgcttatgagatacaggatttgcaaatattttctcccattctatgagttgtcctttactttcttgatgatatcctttgaaacacaaacggttttaattttgatgaattccgatctatctgtattttcttttgttgctctacacttttggtatatgtcttagtgcatgtttttaacgtaatacttctccccacggaagaaatgaggcaggaggggctgttgggctggactgagtggttccagtggactcagggtggcccagggttccttttgagagggaactgaggccctgtccgattcctgagccatgggcccctggagcccaccaggcctcagttcttcgtcattgaacactcagccagcttagggctgggaaagcagtttcgacaacgacttgctccctggtcagattgacacagctgagaggggagaatcggggctctcgacataggtgagcctggcttggaatcctgggaaggccaccaagtggcaagggcacatggaagggacatttcgtctttctgagccctgttttctcacctgttacaaaggtgacggcggtgatgccacttctcagcactcaggcatctggagaggacagctggggtcttgggaactaactctctcctttatccccagccatgaaagctgatcggaagcgcttaaagggcgagaagacagacctggtgagccagatgcagcagctgtatgccacactggagagccgcgaggagcagctccgagacttcatccgcaactatgagcagcaccgcaaggtcagccgccgccctgccctcccctcccctcccgacacaccagctcccacctcccctgctggctggccaccttcacaggctctgcctcttgaatccccaaacacagatagggaggcccttgatgtgtccagccaggcctaggcaccgagataaaaccggcacaacccccggagagggatctccatgtctcctgggcaaacaggacagcgtggactcaggagtccggggggttcagatcctggctccttgtgtgtgtgccctcgcaggtctcgcttgacctctcagagcctcagtttcctctctgcagagtggtgattgtggtggacctttcaaagctacagtaaggactctatgagatgatgaatgccgagcactcagcctggtgcctggcacatagtatagcatcatcaataagacgcatagctaacatttactaacaccataataaaagtgtgaagagagagctggggagccccagtgagacagcaggaagttctgcctatagggagggagtcttggaaggcttcacagaggaagtgacatatgcattgggctctgtggggtgaataggagtttatgggccagacaactgaggaatttgtttcaccatgtatctctctggtatctgtggtatgacatgccaaagaggacaccaaaacttaaagaagagtcagtcccctggccaggcacggtggctcacacctgtaatcctagcactttgggagacccaggtgggtggaatgcttgaggacaagaattcgagaccagcctggccaaaagcccatctctactaaaaatacaaaaagtagccggtcattgtggtgcacacctacagtcccagctactcaggaggctgaggcacagaatcactggaacccaggaggtggaggttgcagtgagccgagatcaccccactgcactccagcctcgagctgaatgcacttctggcctctgttttctgccctgcgtaggcaccttggtcacagcccttgtcacagggtgttcagctcgaggccccttttttgaacagtgggaagcagcaggccaggtgaatgagtccttcccagatgctgcctctgagccgcagttcagagaccagagtgttcagactggatttgaatctagatgcttggtcccccctacccactttggtcttcaccgctgattcctcactgtcacctcccgggcatgcacatcacttcctttctatgatgaaaggagcctcgagagttctctgggccaggccaccacagcccctgatggggatctgggacttctagctgccctcagtgcccgactcgagagcagggcccggctccccctaccctgcctacctctccccccatccccctctgccctgcctgctcgccccagccctcccctgccctgcctacccagctccctctgccctgcccgcccagctccctctgcctagcctgccccgcccggctccccctgccctgcctgctcggcccagccctcccctgccctgcctgcccagctccccctgccctgaccacccagctccccttcccctgcctgtttggcctggctccctttcatattagatgaactgagcctccccatgcctgtcacaggcaaacggtttggcaggaaggggacgacccagaagcaaggcagagggaggcaggggagcccacagaggctgctttctcagactctggcatggggagcaactcatgggcctggggtgcagctcgtgggcctggggtccgctccttagggtgaggctgtctcagcagcattgcctttggccaccagcaaggagtcagagaccaggagctcagagtgacctccatgcagagggaggggtaggggacaccgctatcctgtctgatgatgcaggtacacgtgtgtgctcacaggggcgtgctgtgggagttacggcatgtacttcaagggcttacaggaagagttctcagagcctcgtgtgtgtccattcatttaacatccacacggacactgtggggcatatggttatcctcccatttcacagatgagctgatagacacagagaggggagataactcacccacggtcatgcagccggcgatggcagggcaggggcttacagggcctgggtccagagcctacgggccttccccctgtgcagcgcgcctcttcccccaaccccatcaccccctggcactcagcacagcatcttctggtcgcctctgctccctgcctccccttctgtgtccacctctctcatttctccattctcggcctaaggagcttggtcttttttcagtgggcaaggcagggagagcctctgcctgaccagccccatgcccagcagcagggaaacctggttacctcttttttattggggacaggacacagtggggccagagaaccagcccatagccttcagtgacgtgctggccctggggcagaagacaggctccaagctgaccttctacttgtcccctgagccaccagcttcctcccctcctgggaccagggtcacgcagggattaagagcagacagataggttagcatctcacctctgcactcgctatgggggtggctcgggcaaacagctgactctccccggtctcagccttcacatctgtaaagcaggatgaagattgcaactactcacagcccagtgctgtcagacctgaggttcccggggcatggaaagcaaggggggtaggggcatatgcctgctaccattattattatcattatcattattattgctttcggggattcagagtcagccatttgatcatgaaaattccacagtggatttcaaagcccctctgccggcccctcacctgccactccctgttgttggtctcactggcaaacccggagaaggaaacgaaggccccgggtgggcaggattggagctgtggctggtcccacacagaccccagtcgtaggtctggtttctgggaatggggtggagaggcaagacctgtgcagaaaggaacccagacaagtccttctgggagggacagagggtctcagaggacccaggaatcaggagctagaagaaagagctccctgagaacacatgccctgaaggaggacagatcaggatttagaaaagcagccagttacggtggctcacacctgtaatcccagcactctgagaagccaaggtgggaggatcgcttgagcccaggagttcaagaccagcctggacaacagagtgagacctccatctctacaaaaaattttaaaaattagtggggcagggtggcacacgcctgtagtcccagctacttgggaggctgaagcaggaggattgcttgagccagggaggttgaggtggcagtgagcccagattgtgccactgcactccagcctgggcaacagaatgagaccttatctcaaaaaaagaaaagaaagaaaaaaaaaagcaagagggtgctgagcagagtccaagaggatccaaaagatggcgctgttaccaggtaatcatcctggcagggactgatgtgatggctgccttcagaggccacctcagcaggagctggcatgaacacagtattacctatagcaaatgtttattgtgcacctactgtatacaggcatgaacatggtattactaataccagacgtttgttgtgcatctgctgtatacaggcatgaacatggtattaccaatagcagacgtttattgtgcacctactgtatacaggcatgaatgtgatattaccaatatccaatgtttattgtgcacctactatatacaggcatgaacatggtgttaccaatagcagatgtttattgtgcaactactgtttaaggcatgaacatgacaagtaacagacatttattgtgcacctactgtataaggcatgaccgtgacagtaccaatagcagatgtttattgtgcacctgctgtatacagacatgaatgtgctattaccaacagcagacatttattgtgcacctactatatacagacatgaatgtgctattaccaacagcagacgtttattgtgcacctactgtatacagacatgaatgtgatattaccagtagcagatgtttattgtgcacctactgtatacagacacgaatgtgctattaccaacagcagacgtttattgtgcacctactgtatacagacatgaatgtgatattaccagtagcagatgtttattgtgcatctactgtatacagacacgaatgtgctattaccaacagcagacgtttattgtgcacctactgtatacagacatgaatgtgatattaccagtagcagatgtttattgtgcacctaccgtgcacaggcactgccctcatctcttcacatttgctattttaatagcaatccttcgaggagtgattgtccccattccccccatttaacaggtgaaaactgagacttaggtaaagtctcaggccgagggccacacgattatggaaaggggtagaggcaggatgcaaacccaggaggtctagtcccagagccccagccccagagctcataggactgggcctggcctgggccaccgtccccacaccactcagtgcatgttcagaggaacgaaggaatgagtcccactgtttgccattttcaacaacccaaggccgaccacagagaggaggtcacagctgtccctgtgaaccatgggtagagtgctggctatttcagtggccaaactagcatttcataccagtgcttctctgtgtcttttcatgatatatcaaatttgttttttaaaattatttgggcaaaaatgatacattttaatggggtacatagtgatgtttggatccatggaatgtatagttatcagatcagagtaattaacatatccatctcaaagtgtaacatccatctcatatttggcaataaaattcccatggagagcaccgtgtcattttttaagacataggtgactaggggcatcccccaagtctgaccagccgctggggtggggttgacgctactcaatagaagccttgtggctatgactgccgggggcagctccctgtagctacagctgagcagcaagtgccacttttattgattggcttcataatgcccttcagattcattcagaaaaatgaactttggaaaatactgattttaaaaaaattaataccttaatactaagatatgaatattagaagtggagagagtcgcgcctgtagatcggtggaatagcaacattaaaacaatattttagtcattgttgggtccagccccattttacaggtgggaagactgaggtccgcaagggtcaagtgactgacccaaggacacatgtttagagccagtttggcaaaactgaagccacaagtcctggttttatttcatctcttccaagatcttgcagctggttaccaaaaatgatttgcattttatgtgcatgataaatgtccccctggaacaggatgactggaaccctcaggttccctcgcccacgcaactgtgcccgcttagtctgccatggcccacccaacttctccagcagactcctgtaggactccactggagcaggcagcaggaaggaccccaggccctgagctactgggagtcgggggatggcacaggaacaaggctgctgagaaaggaggggtcttggcctgtccagaatgtggccgatgacccagcatggtggctcatgcctgtaatcctagcacttagggaggctgaggcagacagatcacctgaggtcaggagtccaacaccagcctggccaacatgacaaaagcctgcctctactaaaaatacaaaaattatctggatgtggtgttgtccgcctgtagtcccagctactcgggaggctgaggcaggagaattgcttggacccgggatgcagaggttgcagtcagccaagatcgcaccactacactccagcttgggtgacagagcaagactccatctcaaaaaagttaaaaaaaaaaaaggaaacaaaaacaaacaaacaaaaaacagaatgtggcaaaactgcaacatttctgaaagctgtgccaaatgcactttccctgtcacgtgactgcagatggaagggaaacaggccactttcatctcaccactgtcacctccccagccagactttttttgttttttgttttttttattttttttgagatggagtttcactctgttgcccaggctggagtgcagtggcatgatctccactcactgcaacttctgcctcctgagttcaagcgattctcgtgcctcagcctctggagtagctgagaatacaagcgcatgccaccacacctggcgaatttttgtattttttttttttttttagtagagatggggtttcaccatgttggccaggctggtctcgagctcctgacctcaagtgatctgccctcctccacctcccaaagtgctgggattacaggcatgagccaccgcacccggctcctagccagaccttcatgcccctgcagcccctcctctcccctctgtattctactctccgcattttttttctttttttttttttttgtttttttgagatggagttttgctcttattgcccgggttggagtgcaatggcgggatctcggctcactgcaacctccgcctcccaggttcaagcgattctcctgcctcagcctcccgagtagctgggattacaggcatgcaccaccacgcccagctaactttgtatttttagtagaggcagggcttctccatgttggtcaggctggtctcgaactctcgacctcaggtgatccatccacctcagcctcccaaaatactgggactacaggcatgagccactgtgcccggccacactcccctcttatgtccatgtgatccccaagtgctggcagccccaaagaacctcagctcccaggcctgtcatccaaggccccatgaggtcttggccaaatcccaccctcagaaattcccaccacccccaacccccttccagttccagacctctcaggcgtctcctttcagttcctttcctgcctcaggtaccagcagggattgaggcctctaccacactgtctatgagctggcgaagttgttttacctctctgggcctcagtttgctcatctgtgacatagggataatcatagtccctgcctcaggggtggttgtgagatttaaataatgcacctaaaagccttagcactgtacagaacgttctgtgacagttgctgctgagcccagctctcctgctgccgcggaatatgaccccaagaaggtgggagtccaaaacttgaaagcacctacaggccttcccacccggcctagagcccttggtctgttcgtgagtagtagtgtgaaccagtgactgcgatgagacaaaaatgatcctgagggacctagtggggcttcctcctaattcagggacattttataagcagcctcttgtacaccagcgggttctcagggacaacccttaccccagtggtcagtttctacactgtagcagaatttttcactataagctccacgagtgcagggatttttgtctggtttgtaccagacaaatatccacaaatattggttgaataacagaccagtatcagcttcaaataaagaaaacaggttagagagggcctggggcttctttcttacgtgggtggtcagggaaggcttctcagaggaggagacaattgagcagggatctgagtgaggcgagcaggtgcctgctgggagcccagtcctgtgcagagctctccaggtggattccttcatgcagacccacacaaacgccccaaagtatatgtggtattatcccctggttacagatggggaaactgaggcagggatgactcacagcagtcattgcaaagccaggatttggcccaggttctccctctgtctccagaaccaaggccatagctacagctctgacagccacagagaaaaggccacgttctccctcagcctccctgtctctcaccatctggaagtgaggccttcagagacaggtttgtcagacaaggcaggatggtggcctctctccacggtcccaggccacacggagaccttggatttgcttttgatttggtgaatgggaagatggtggctgggtggatgggtagagctccccgctgggactgtccttctcaaaaggacgcctgttgttctgaaactttgctccggccaacagaggtcacagcctcgattcagctgtctgttccttccctgctggctctgctctggggactggcacagccggggcctggcccttccctggacaatcacagaaaacagctcatgcaggagggccagcctggggaggggctggggcaagcggctgaggactgtgctgcattcaggacacagcaactgtttctctcacaggctgtgaccctgtggagtggtggccggaccttgtggcagtccagacaattggggtcgctggtgcctccttactgttgaccctgtttccctgtgatgaacacaattgaccaaacagaacaaagccccagaacaactattgcaccctaacttctgtcagactgtgttaagtatttcccgcacgtgaagtcattcaatctttagaattctttgaaacaagtaggattgactcctgccccattttacataaggggaacccagactcgatgaggtagaatgacttccccaaagcagtcatttgccaacttactcattcatgcagcaaaaaaagggtttaatgagtgtctactgggttcgtctctgttccagtcttccagctagtttgtggcagagctggagttcgtgcccacggctttcccaccacagagccagagctcctggccacatgtcatggggcctccccacttcttttttttttttttttttttttttttttgagacagagtctcgctctgtcgcccaggctggagtgcagtggtgcgatctcggctcactgcaagctccacctcccaggttctgccattctcctgcctcagcctcccgagtagctgggactacaggtgcccgccaccatgcctggctaatttttttgtgtttttagtagagacggggtttcaccatgttagccaggatggtctcaatctcctgacctcgtgaccccacttctttttccatctaggagttaggccccctctaggcatccctgggccaggaggagcctggctgtaacacccacggtgctctctccctctcccacccacaggagagcgaggatgcggtcaaagcgctggccaaggagaaggacctgctggagcgtgagaagtgggagctgcggcgccaagccaaggaggccacagaccacgccacggcactgcgctcccagctggacctcaaggacaaccggatgaaggagctggaggccgagctggccatggtgagaaccctccccacccaggtgggcctggcatctgctagcagtgccgtgctgggagccgggacgtctggcaccgactcacatcggagacctagggtggggtgggtggggcagagcagaacacaagcagggggcagggcccgccgcgggagggggctttctgcaatgcatcataagtttccctccaagaccatgcccccagagactgggccagccttttatccacctgccttgggcccagggagtgtggagacgctgggaaaccactcactcctccacacaccccagcctactattaggaaaaaaaggcctagtgcagtggctcatgcctgtaatcccagcagtttaggagaccagggcaggtggatcgtatttgagcccagcagcttgagaccagcctgggcaacatggcaaaaccctatctctaccaaaaaattagccaggcctggtacatgcctgtagtcccaactagaccggtggctgaggcaaaaggattgcctgagccctggaggtaaggctgcagtgagccactgcaccccagcctgggcgacagtgagaccctgtctcaaacaaaaaaaaaaaaaggaaaggaaaaaaaattttttttgtttaaaatatacatatttgcttaggaaaatatttgggaggaaatacatggaaatattaatgttcattctctcagagtggtagcaacttttatttatttctttgtttgtttattggcctcttttcaaatgtctttgcagcaaaaatgtcttacttgggtcattaaggaaacaaataattttttcctaacccaaaccaaaccctcaaaatacttccagacactttgttttcccaggagatgcgtaccctttgtgtgtggggacagagggtccgggtcgggagagagagccctggaggtctgttctgcctgctcctgtgtgaccttgggctgcccactcaactgttctgggcttcagtgccttttacttgttactgggctgggagtggagtcttaatcccaccctaccttccccacagggtggctgggcagatccagggagcttgtggctagagtaggggaagggggaggacgtaagtcttagaggatttgtcgtcctgcagagtgctgatgccagctaacggtgtggttacagccatgtgatctgggttcgaatccagccccaggtgcttcccagctgtgtgactttgggcaggagccttcacctctctggactccatatccatcaactcaaaacagagataatggcatatgtagttgacccttaaacaacgcagggcttaggggtgccgatcccctgcgcagctaaatccatgtataacttttgactcccctagaagataacttctagtagcccactgttaaccagaagccttactaagaacagtcagcgagcacatcttttgtgtgttcactgtgtcgtgtactgtctttgtattagttcattcctacactgctataaagaaatagctgagactgggtaatttataaaggaaagaggtttaattgactcacagttccgaatggctggggatgcctcagaaactcataatcatggcggaaggcaaaggagaaacaaggcaccttctttacaggatggcaggagggagaatgaatgcagaggaactaccacacgcttatgaaccatcagatctcgttagcattctatcactatcacgagaacagcataggggaaaccagcgccattatccacttacctccacctggtccttcccttgacacgtggggattacaattcgagatgagatttggctggggacccagagccaaccatatcagtattctttgaataaagtaagctagagcaaagaaaatgttattaagagaatcaggccggacgtggtggctcatgcctgtaatcgcagcactttgggagaccgaggagggtggatcacctgaggtcaggagttcgagaccagcctggctaacacggtgtaaccttgtctctactaaaaatacaaaaattagccagacatggcggtggatgcctgtaatcccagttactcgggaggctgagacaggagaatcgtttgaacccgggaggcggaggttgcagtgagccaaggtcaagccgctgcactccagcctgggcaacagagcaagactccgtctcaaaaaaaaaagagaatcataaggaagagaaaatatatttgctattaattaagtggaagaagaggatcatcatcaaggtcttcatcctcgttgtcttcacgctgagtggctgaggaggaggagggagaggaaggattggctttgctgtctcggggtgacggaggtagaagaaaatccgccgataatcagacccacgcacccatgccgtccaaacccacgttgttcaagagtggactgtgctttgtggggctcttgtgaggatttccaagaaataaagcaggagaagcatttggcaccgggcctggattcctggacgtggtaaaaccacggcaggatggtttactaagggccaggccccaggacaggccggggcaggatccgtgggcctagcctaggtctccttgtccaatgctgacccctagtggtgagaactgctgggcaggaaaaagctgcggctgcagggacttctggggtccagggggttcccaccagtggggttgataatactggaggccctgctgctgcgtgcagcccagaaagaaacctttgaacttgcaggccaggaaaaggcccctgttctcccaggtctttctcatgccttgtggacagacagatatgtcttccttccttggagtcctggccttaggcatccgaggactccctgggtctttctggcctagaaaccagctcaccctggcttccactcccactgcgtctggacactcagcctgtttccgctctggccaagaaaactcagcttctggcctccttctggcaggcatcagatgcatctgcccgtgtgaatgttggcaactcaggttgattggtttatgttcatgttaacagcacatgcagtgtctacccagggcttggaggcagagagaaggggcttcacgaggagctgtgatgaccccagtcttgttggggtgtccacctgactgcaggttccctccattgcccgccatgcctaaagtttcaccgccaggctgtgttgcctgcaggcccagctcccccactgcacagctgacccttcctcggggggtgccttaagtcctgggttgcaagcaacagaaagcagctctgctctgccagtggaagcatagagggtgggttggaaggaagtcagggtccacacgtgcagtggggaggtggagggcgcagcttagcaatggcagaagccacggcagctgcaggccgggcgtggtgtctcgtgcctgtaatcttttggctttgggaggccaaagcgggcagatgacttgaggtcaggagtttgagaccaccctggccaacatggcgaaaccctgattcaactgaaaatacaaaaatcagctagatgtggtggcacgcagctgtaatcccagctcctcgggaggctgaggcaggacaatcgcttgaacccagaaggcagaggttgcactgagccaaaatcgcaccactgcactccagcctgggcaacagagcgaaaccccatctcaaaaaaaaaagaagccccccagctgcggaggtggggagccaggcccggggggatggtgcactcagcagcccctgcagctgggggacgaacatgtcccttttgtcttctgatgaaatcttacctctgtgaggtccatgcagtgtgccctgtggcccatcttgggccacttacttgccccttacccaggggtcctggctgtagctgctggtgctgggcggtttcttaagtgaccctgaggtgctgccacagaggtggcaaagctcacacctgccagtgacactgaggccactgggaaagcaggtattggggaaagagcccaggctggtgccaagtgaggggtgagcagcccctcaggatccaggcatcgtccctccccccatgtcctgaggagccaactctgggccgccccacacaccctcttcgctgcttcacttggggaaaagccaaaaagacatttgcttctgcagacgtttcccaagaagcaaagccctctattggcatttagcaatgaaggtgggcaccctgaggcctgcccagccatccacccttgctgggggcatttcctgttaaatcctgattgaaccaggcattaccacccacacagcaacttctctgtaaccacactggccccaagggaccgcatgtgtgtgtatgtgtgtgtgtgtgtgtatgtgtaaaatattgtttatcaacttagaatgtcaaggcccgagcccacatgagcctaccgttgcccccgcaggagcctcccctccatggccagagccagcgttgatccttggttgttggtcctgggtcgttgatccttggtcgttggtcctgggtcgtcggtcctgggtcgctggtcctgggtcgtcggtcctgggtcgtcggtcctgggtcgtcggtcctgggtcgctggtcctgggtcgttggtcctgggtcgttgatccttggtcgttggtcctgggtcgttggtcatgggtcgtcgatcctgggtcgtcgatcctgggtcgtcgatcctgggtcgttgatccttggtcattggtcctgagtcgttggtcctgggttgttggtgctgggtcgttggtcctgggtcgttggtccttggtcgttggtcctgggtcgttggtcctgggtcgttggtcctgggtcgttggtcatgccgttcagtggtttttagcatgctgacaacattgtgcagccaccactgctgtctaattccagaacagttgcatctccccaagaagcaccccgtcttcatgcgcagtcactccagtgaggtctgtattcttacggtttcggagctggagatcaggcgatcctgtactccatggggtgacggctttgccgggaggcttttgacgggagtccagccatggcctgaaggaggcagctcccttaccagccttccctcagtccacaggcctttcccaccagcctccctagtcacatgtggggctgggagacagggctgcctgctcctgagaccatgggcatcccccacacactggtcctgtccctgggagcccggctcacacggacctcgctgctgacgagcgcggcttctccagcacgggaaatgctcttcagtttacggtgctctctgtaaacaagggcaccatagacgtttggggccacataacagtggtggggctgccctgtgctctgtagggtgtgtggcagcttccctggcctccacccaccagatgccagcagcaccccctccaccccagccccccagtgtcacagcagtagactccagacatggccagatgtcccctggagtgcagaatcaccccagactggaagcacccctccatcaagtaggacattttgcaagaatcagacgttcctatctgtctgggcctgggctgtttgagtctagcagagtcccagtttgggtcctgttattttctgtctgtgtgacccttgacaagggacttaacctttctgagcctcagtttcctcctgtataaaatcagaactataggccaggtgtggtggcacacacctgtaatcccagcactttggggaggccgaggcaggtggatcacctgaggtcaggagttcaagactaggttggccaacatggtgaaacccgtctctactaaaaatacaaaaattagccaggcatgatggcaggcgcctgtaatcccagctactctggaggctgaggcaggagaatcgcttgaacccaggagggttgcagtgagctgagatcacaccattgccctccagcctggatgacagagtgagactccatcagagtagagtagggtagggtagggtagggtagggtagggtagggtagggtagagtagagtagagtacagtagagtacagtagagtagagtagagtagagtagtagagtaggtctccatctcaatagaataatagaatagaatggaatagaatagaatagaatagaatagaatagaatagaatagaatagaatagaatagaatagaaccttccccctagagtgacagtgcagggaagtgaggcagtgggtgaatcaggcaggcacgctgcagaactcggtcagcgttcacagctctgtgctgaggttgctctagagccaccctgtcctcagaccccactggggaggaagaggcgtggattctcatgcctgttccactcatcagtatttgacctcgcacatgtcacctttaaccttttcctgcctcagtttcctcatctgtaaaaacgacagccaccacaggcccagacgagaggcagggactgtgagggatgagcgggcggagaagcaggagggcttggccaagcctcaggtttatttttaatggccacgctctgagtctatgtcccttgtgcctgttctcagctgcaacgaaagcagtctgccccaaatgtgccaccttcaggcccctggccaccaccttcttggaccatttggaccagcccttgccaagccagttcctaggctgggtctgaacccagagtggtggggggcctgccgccctgcatgagggcagggtctgcccaatcccgagcccacctgagccacgcctgtcgttgcccccacaggagcctcccctccacagccgagcctgcattggtccttggtctttggtccttagtcattggtccttggtgttgtgacccatatttgcctcatcagctcacaccggtgcctccctgctggacctgctcccacccgtacccctgagatctgtgaaagagggtcccagccggcttccccccaaggagaagaacttagctgtgccacagagtgtgtttatgaagcacgggaagaaggtggccttgtgcccgctcagtgcccgtttggcgcagtgtgccatccgcacaggagcaccagccttccgatgtctgctcagaggctcctgcctcgggatcctcccagtctttaccccagagaaacattccctagacgagcactcatctgctgaaggacctggtagaggattcggtttctgggcacagcatgcctgcagggccagacttgctctctgatgtgggagatgtgatgggtgcactgtggcctccggatcagcggaacctcaggccctcctggttaacaggaactgccattggccccagccaaaaggcaggtgagggcagggccctgtgctgccatctccccttcctgcctcatgggtctcactgcccaggctcagggagcgcataagtaatcctaactgagcactatggctgctctgagacagtgggccagaccggatccttgaccctggtgtgaattactcctcacatcatccctgcttgtgaaatagagactctttaataacaatcgctaatatttgttgggtatttttaccctggaccaagcactttcccagcaaccatgtgagggaggaactgtcattatccccgttagacagctggaggaacgaaggcacggagaggtgtggagcctaccttgggatcccacagctcagagtggcagagccagaaccaaatccagacagagcccaagctccaaagaactgtgccagggcctggccacctcatcacacaactccagagggtgctgcttacataaacatggtccctcttgttttcaccatcttatattgtgggaccttgaagttcagaatggtggagtaatttgctcaaggttacacagcaagttaagtgggagaaatggagtttgaaactagttctgtctgacttttgtcaaatggatgcatttgtgtcaagttaacaattcccaggagcttgacgttccaagttctgagtgcttggaagaggctggaggctcagagaggagaagagaagagtcagaacccaaggggagttcccagcattaaattgcatttagtggaagagattagtcagagaaatgtgtcaattgccacaggagaggatctaatgcatgtgtgtgtgtacgtgtgtgtatgtgtgtgtgtgtggtgttagtctcttctcatgctgctgataaagacatacccgagactgggtaatttttaaagaaagggaggcttaatggactcacagttccacatggctggggaggcctcacaatcatagtgaaaggtgaaggaggagcaaaggcacgtcttacatggtggcaggcgagagagcatgtgcaggggaactgccttttataaaaccgtcagatctcaggagacttattcactgtcacaagaacagcacgggaaaaacctgtccctatgattcaattacctcccactaggtccctcccatgacacgtggggattatgggagcttataattcaagatgagatttggatggggacacagccaaaccatatcagtgcatatacatgtgtatatgtgtgtgtatgcatgtgtgtattgcatgtgtatgtgtgtgcatgtgtgtatgtgtgtatatgtgtgtatgtgcatgtgtgtggatacgtgggtgtgaaagcaggtgcatgtattttagatgagacttcacacgcgtcatctgcagttcctctccattgtagctctgccttggaagcttacaatcctgagtgggcagagtggacagtttatccttgtgcttcagaactcacaggtacagccaccccattctgaaggaccaaccgtaggggacctcccaattgtcaggtagcaaggatgtcaagctgcctactgagatggaagatgccactcccaggcccagacagagatgagaccccgcctgggagaaggaagccgatgggttcaggagagccaccccacccaggcctcttcctcactccttcccgtgctccctccaagggctgcctgtttcaggggctggcttgtacaatcctgtgcttcctaggcatgtggctgggagtgtttgcaggagggggagctgagggttcattcctgcatgatggcagaccagcctgggtgcttatttctcccgagtcgcactttctgggcagccagatggactgggcaggtggaagcaagggagtggggcatccccctaagactgcgagtgtagcagtgtggagggccagggggctgtgtgcacgcacacctggagggaaggcaggtgccgccaccgactcgcctgggctgggtgtggtggttcaggaagtgtgggtctccgtgatgctaggtctgctgcaggtgtacagaggctcgagacacacccagcttcactccttccttaaacaaaaaagttaccccattgttcttgcagtaggacaacagagctgttccctgggccatcaacacaacaaaggctctgtgaagcagcgacctgcttccatttatcctgcaggttcttacagcatgcatcctggatgtgctgagccccaggccgggtgctggggactctggtgagcagacagaactggcccacatcatttgcgctggttgttttcttgccccacaggaatgtgggcttaagggaaaccacactgtgctcccagtcagacaccagggtttggtacccaggttggatgttgtgcccactggagaagtcactaaacctctctgagttttggtttcttacctgttgagcacagataatcccgaactccctacctgcaacccagcactgttgcacagagcgcgtgagggtggcagagcacaggtggttttctcggccagagcaggggcaagccaggttggcggggcaaggctgacaccctcagcttagcctctgcggtatggatttctattccctggaagctggcagtgggagggaagtgatttcacagacttctaggatgtccgagctggaaggagccctgaagatcacttggtccaggcttttcactatacagatggggaaactgaggctcagaggagggagtgacttgtctaaaataatacagctggttgatgtgatgagagtgcatcaggcattaggccaaggactgtctgtttcttggtgggaccctttctcaagaatccctgctctgccaggaagaactccaggcctggggcaaagttagaaaggttgtggagagattagatggatttttttgttgttgttaatctgtgttcacatgagaggcaaagccagcactcacagtggccctgccatctgtagctaccccggaaacgtccatgttcacccaaaacctcagtgcaggggacccctgggcctctccctgtctcctctgccctgtcatgagcccccggagccaatcagaagtagaaaatgactgtgatgaaaagaatgtgcattaacactttgagaggccaaggcgggtggatcacttgaggtcaggagtttgagaccagcctggccaacatagtgcgaccctgtctctaccaaaaatacaaaaaaattagctgggcatggtggcaggcgcctgtaatcccagctactcaggagactgaggcaggagaattgcttgagcatgggaggtggaggttgcagtaaaccgagatcgcgccactgcactccggcctgggcaacagagtgagactccatctcaaaaaaaaaaaaaagaagaagaagaagaaaataatatgcagtagcacatttctaatacttgccgtttttctccccaaaagaatttgagatcacttctaataaaaccccagatattctaaggggagataacacagctgaaagaggtctcagacactgggcagagaaaggaagacctgtgtggccagtcgaggcggcctcccggccccagctcagcctcacacttgtccctgggctccctcctgtcctacatgttcttggcgtgggctcctgagagctgggcttaggatctgcctgtccccagcctgcattcaagaaggagctagtcgtgtaggctgatcgtgcacctgcccatctccttgctagttctgcagaaggtgcacatggcacttctctggcaaaaccttgtgacagggagaagaagcagccttcaatcttgcaaggagttaaactaatgggagccaaacacctttttcttacaatcggacttgaatcctggctagtccctggagaatccaaaagaatgggtggtaagagtgttcctggggccgggcgcagtggctcacacctgtattcccagcactttgggaggccgaggcaggtggatcacttgaggtcaggagttcaagaccagcctggccaacatggtgaaaccccatctctactaaaaatacaaaaattagccaggcatggtggcacatgcctgtaatcctagctacacgtgaggttgaggcaggagaattgcttgaacccgggaggcggaggttgcagtgagctgagccactgcactccagtctgggcaacagagtgaaactccatctccaaacaaaacaaaaaaaaggagtgttcttggaacccctctatttctggtctcactttgctcttggtgggtaacccccaggttagctctcgggtgagttaacttgacacaaatgcatccatgtgacaaaagtcagacagaactgggttcaaacttcacttcttctacttgttgtatgaccttgagcaaattactccaccattcggaactttaggatcccactatataagatggggagaccaagagggaccatgtttatgtaagcagtgccccctagagttgtgtgaccaggtggccaggccctggcacagttctttggagcttggtctctgtctggatttgatcctggctctgccacttctgagctgtgggatcccaaggcaggctccacacctctccgtgccttcgcgcctccagctgtctaatggggagaacaacagttcctccctcacacggctgcggggcaggcgcttgacttaccaattgacgctcgatgccgagccagcaatacccggtgcagaggatccgggctttctccccatggcggtgggtggtgccaagcagctggccaagagttccccttgatcatgacttcttcttcctgtcttcttgctctctccaggccaaacagtccttagctacgctgaccaaggacgtccccaagcggcattccctcgccatgccgggcgagacggtgctcaatggcaaccaggagtgggtggtgcaggcggacctcccgctgaccgcagccatccggcagagtcaacagactctctaccactcacacccccctcaccctgcggaccggcaaggtgagtcctgccctggcctggctccaccacggcttcgaggggcttcacaggaggccatctgacccagtgggagaggcagctgctttgttcgtactacagcagcttgggggcgtgggacagagaccttgggctcatgtaactgaaaaatctaagagatggacagcaggcatagctggatccagaggttcaaacactatctgggtccctctgaccgtctctccatctcttagctctgcccacctccttttggcctcatcttcaggctgtctctttcagcaagaaagtaaaatagtcccctgcagttccagatgtttaagaccctcacagctcaagtcttaagaaagaaaaactatctctttccccctgtgtccatagcaaatcccaaagaaagactctgattggccacatcagagtcacatgggcatcctttggcaggggaggcagcagaactccttgattgacagctctggccaatcacagggcatccaagaggggctgatgtcaatgtcacaggtgtttgctccaggcactcggcagggaagtctggcctgtggacagcatctgcacctactgcccatggaacaggctccaaacttctcgctgtcctgttgcacgtctgcaggccaccttgctctgttctctgtcccttctgcaagtagttgcccttatgtgatagatgcaagttgggaacaggcatccagcagcagccaatgcaccagaggtaagagctggtcactgtgaaggctgcaggctgggctggctgttggagctgcaggagatgagtcagacacagccctgacctacaagggcctggcaggctgatcagggagatgccagcaggccctgctattgcctgtcaagggtacagatgggggagtgtaggtgagtcattgggacgaaggggcataggccctggattcagactgctgggttcaactctggccctgctgcttactagaggcatgacccatgacctaggccagggtcctcagtttcctcatgtgtaaaaggggcattaggctcttagcacacaacgtacgttaaagacgtttgctgagacttcctttacctacttcatggagctgtcgtgaagatgaaatgtgtaaaactgcgggaatggggctgggatcatggtcagagctgggtaaatattagctgctattctcattatcatcgtcatcatcaccattgttgtcatcattgataggtgacacaggggactttgagaacccagacagtaagcaaattcagagtcttcccttcccattgagtgggatagcagccctcccttcactgtctgacccaaggtggtgtgacttttttggggtaagcgtgggcagctctggccttcaaagcctcaactcagaggtggaagagcttataataaaactgctcggggccagcatcctcgtcaggcagggaaactgagacccagagagggccaccacttgttcagagtctcacagcccagccatgcagccagctgtcctggctttgggtccagccccagggcagcaggagggcagaggtgcaatttgaaggcagacagggcttgggcagtttctgaatcacgtgggggcagcagactcctggtcatcctcgtctgcctctgcagggcctctcctcaatggagctggctctggtctgggaaagcttggacaggctggtggatctgccctctgggcccttcctcctccacagtatctgcctcacatacaaccatctccatgcattttatcagacaccccctcctccaggaagccttccgtgctctctcccctgtgtcctctatgctcctgtaaagttgggtgctcacctgcgtcatagcacctcttaccctacctcgggtttgctgttgatgcatttgtcacatgactcctcccatctgtccagtgcctggcactgtggtaggctcatcatacatgtggctactgtctgggattggtaccactggcatccatccccatgttacacataacaaacctggctcagaggggctagggaggatgcccaaggtcacacagcctgtagggtaaactcacccagattggaattgactccaaagccagggctccttcagccacccatcttctgtattagagcatatggccattggtggcaaggactgtcttttgcaggaatgcaaccccacctgctggcatgccgcctgcacatggtaggtgcttagccagtcttgtcaaacaaaagatgctttctccatccagtgccaatgcctgcagacaggagagcaacctgctggggacttggaagggcttctgagctgtggcttctggtctggaccttccattcaaccactatttattgagtacctattatgtgccaggcaccatgagctctgggattcgacaggataagacacccagggtacctgccctcacagagcagatgttgtcagtgtacagatatgatatgtaaatatactattaaataacaagcaggccagatgcagtggctcacgcctgtaagcccagcactttgggaggctgaggtggacagatcacgaggtcaggagttcgagaccagcctggccagcatagtgaaatcctgtctctactaaaaatacaaaaattcgctggacttggtggtggcagatgcctgtaatcccagctactcgggaggctgaggcaggagaatcacttgaacccgggaagcagaggttgtggcgagcaaagaacacaccactgcactccagcctgggcaacagagcaagaccctgtctcaaaaataaataaataaataacaagcagaacgatgacagattgtaattagcacaaggagagaaatcaacagaaaacaggcactttttttttttttttggagagatggagtcttgctgtgttgcccaggctggtttcgaagtcctgggctcaagcagtcctccctcttccgcctcccgaagtgctgagactacaggcatgagccaccatgcccagccaaaagcaagcactttgataagaaccaacaagacagggtagggagagctgattactggggaaggcctcctgggacaggctgagacctggaggatgacagtgcccctgatgggcaacaggaatggcagagaccaaggcagggggacatggcctgtctcaggcagtcagaaggctgatgtggctctagccgaggctgctggggtaggcagggccgtggcacatcaggccacctcggaggccaggaggaagagagatgagatgctggctggtggcccatgctctggtgtgtagagtggagtcagcgcgacccaccgggaggcctcatggtcttccaggcgagagtcagtggtggcaatgcagtgggagagaagcaggcagatttggggcaatgttttggagctgctgctgccgattggatgtgggatatgggggaaagagagaaagtggtggtggcctttaggtttctcatttgggaaaccgatttggggcagtggttaggattgcaccaggtctaggaatgtccaggtggtgggagcatgtgagtagagtcacagagtactcacgtattaatgcatcacggtgctgcttagaaatgaatttataaacatcaagcactttcctgtattggacttggaaacgaggagacttgaatttggaatgagaagacttgaaaacttccatgtcttctcctcgttcacgctggtggaggagggttcattggatccagaggctatgggaggttcttcccagcagctgctctatgggaacgtgtggagctgtggagtagggggttggagaaccaggcaagtctcttcccttctctacacctcagtgttcccatctgtagaacgggggtgttgggtggaataaccgccaaggcagcacaggcgaggacgttctctccatccctcactcaccagctgtccctgctttccagcggtcagggtgagcccctgccactcccggcagccctctgtcatctccgacgcatctgccgccgaaggcgaccggtcgtccacaccgagcgacatcaactcccctcgacaccggacacactccctctgcaacgtaaggccagcagcagcggggcctgggcccctgggccctgcccagaaactgcaggggcgggggtggcggggtgaagccatactcgctgtttcctctcgtccacccagggagcactctggcgaatgcatttcctgttctgttctttccttttgcaagaagcgatggatgtggggagaaaaaggaatgaggcccgtttgctccttgtgtccgggagggtgaggagaatccagaggaagcgggcctgggtcggccgcaggcacagcctggaactctgccccagtgggccctgtctgggaccgtgggcttctcctcccacacattaccttccagagctcagggcctccccagcacctcctcatttccctttagagccagctctctatcctgacccaggagtcttggcatgaattgcctctggagaggcttgtgaatatggtctaagtttgtttcctttgtttatttcatcaaacactttttgattgcatactgggcaccagctcccaggaggcaaaggccctagctgcctagctcttgatgactagtggggcagacagatgggctctgcaacagtgtgggagtaaattgaaggtgggttgagcttctgaggacagttggaagccatgtcgaggctctaacatgaaatattggggtctgggtgtggggaccaccttgaatttttgttttatcacacagttggtaatgcagaggctcccctctgccatatcctgaagacagacatcatagggttagatcctcaaatgcacgagacggctttttccaaaactcagttaatgtcactttattaaccagcgaaatagataataaaaaagaaatgaggtgaacacattggacaaaaccattacttgccagtgacatgattctctacctggagaactcaagagaataacttgaaaagctattagaatgaataataagcatgtacataacagtgttgcttggaaatcagtgtgtaaaaatcaatcactttcctatagatgagtcgtaattatggaaccatttttttcaatccacaataatgaaaagtgcttataaaaatagctaagagtaaacttcagagaagctgcctcagtctgctcaggtgggcggcagagattgctggcccggggactttagatggcctcctcagagtaggaaggtcatttgcagcctggggccctgctcaggcctgggattctcttttttattgttttattttatttatttgtatgtgtgtgtgatggagtttcactcttgtcacccaggatggagtgcagtgacgcagtctcagctcactgcaaccaacaccttccaggctcaaacaattctcctgcctcagcctcccgagcagctggcattacagatgcctgccatcacacccggctaatttttgtatttttagtagagatgagatttcaccatgttggccaggctggtcttcaactcctgacctcaggcgatctgcccacctcagtctcccaaagtgctgggattatagacatgagccactgcacctggcgggattctctgttttatactggtgctttgaggaagcagtatgttcttctcttgtccccagaagagaatcctagtgacaaagtctatcttgactaacagaaccaaggcaaggaaggtgggccactggaggggtctctgacatccattccctgatcctgaaggaccactgtggagttatacctacagccagcagtgtccctgcaccattctcatcccagttgagaataccttccccccacggccatattttgtcttctcgtggtgggcccatggggactctggcagcagaaatgctgctggaaaaaccccattctgcagaaggagttctccaaaggcctcttgaattgcatttgacccagtcctagtcttttgcccaccatagccttggcacattcctgctgccaggaaatgggtgctttgataagccagttgtctgcatacaggcgtttcagtgagcaggccccattctctttacccatagatttggcaaagatgttcctatccagagtggaactatcttagctgccttcagaatggattctgtttgcaaaccttgagactaaagactaaactaccattcattaattccctcacttcctcaaccctttttatccccccatctcaacaggtgtgcatgcaggtaagccaggaagagcccaaaaatagctacaggtaaccctttgccttgggcatctgacgtccaccagcaagaatagtgcagcctggactaatgactgcctcatcctctcacactctggccactaatttagagcaaaagtaggaactcagcatagagaggttggagaaggttgacggaccttggcattatgcttgcaattccagaaataaccaccaggagtctccctagtaatgactgttttgatccaaaggatctgtgggctccagacagggcagactgattctgggatgtagtgaaggcttttgtacacctgtaggctattaagggttccctccacacccacgtaaggcagggctggcaacacaatggaaatgtcctacctgcccatcctagggacctgtcgtctgaggctccctaggaaaaagggaaggagttcagacccctcctggggcagcccaaagctcaggaccaagtatgcagttaccctggagctcctgcctggaaggagcactgtgccaggaggaatctgacagcccccaattggagctgtagctctgcatccaattagctccacggtagtggactgtctgctgcctctcttgatatctgtgaatagggctaacgagtcctgcctgcccctgcgcaaactaagagattcattgtgtcggttgtgggggaagctagaggctacgtggtctcccaagtttgtttctgtcccaaaattctctattttgtgctttttctataaaagtacatttctttatgaaaagcaccaagtctaaccaagctctagctctaactcagaggacagactgggacaggaacttagacgccctggagtggctaatttgttggtcagaagatgctgggggttgagaggccagactgggcaggagaggaccccaggaactctagggaaactccaggccccatcaataagccatctgggggtatctgcttcaggagatggggggtgggctccccactgcagaggcagggtggcccctgagagatggcatccttccacggaaggccccacaccgcacgggccgcctctgctctcctgtgtcacctgtctctgctgtttcatcttcctcttctcctctggctacagggcgacagtcccggcccagttcagaagaacctgcacaaccctattgtacaggtaggtgtgccctccctggccacttgaaccctccctccaccccaccttgactacaacttcaccctctgttcccctgagcccacatccatgccgcacacccaaggtggagaggatttatgccacttccgctgagcccacgtccatactgcacacccaaggcggagaggatttatgccacttccgctgagcccacatccatgccgcacacccaaggcggagaggatttatgccacttccgctgagcccacatccatgccgcacacccaagatggagaggatttatgccacttctggagtctcaggtgggctggggcctgagccagtctcagcacctgggcccgcctggccctgtgccctgcagggctgtggagctgctgagtgcacacatgtcctccgtcctgatgccctggccatggcttaccctggcagccagctctataaaattcccattattattgaaaagctcatagcccaggcagtgggttttttgtgctgctagaaacttgattcatttttaacattttcaatattctgtcatcagagtgaggagggggctgcagggaggacaaacaacatgaatttgagggtctgcaggggtctctgaagtcacctttctagtcctgggctccccacctgtgggtctgcacaccacccattcgcaacggagaccaccagggaagtggttcaaatgcagattcctgggccatttgccctagagattctgatccaccaggtacagggtggggcctggaattcaggaaatccctaagtgtttggggaaccatgagtcaagtctaagccccaccccggttacgcatgatgccaccacatgtctttgtatgaagcacttggcagtttgcaaaactctcctgcagataccacccagatgccggtagtgtccctaacaggagggcagggtagaccttaccaccatcatcttatattgttttcccacgtcacagacaagaaaacgtctcagagcagctcaggtgctttccagggttccacaggtagagtcatgatcagaaatggagcccccggtggccatactgtctcctgtccagggcaagtaccaagccattgccttcggctgacgcaggctccagactcctccacattttccggactctcccaggcctccttgcccatgtcactgtgtgcttagtgccctggcacggcagacagggcctgtggccacccttcctccctgtggcctcgcatcgtggacatgaccacaggcagtggccgagtgcatggacatcctcctacaagccctcaacaagcacctgaaagttgtgggcaaattgaatttaaacaatattattacagtacaaatgaccacagctgctcactgtactgaatgcctgtggcacaccagacaccgtccttggggtctttttctttcttttttttttttttttttttttgagacggagtctcactctgtcgcccaggctgcagtgcagtggcgcgatcctggctcaccacaacctcctcctgggttcaagtgattctcctgccttagcctctcaagtagctgggatgacaggtgcctatcaccacatccggctaattttgtatttttagtagagacagggtttcaccatgtttgccaggctggtctcgaactcccgaccccaggtgatccacccgcctgggcttcccaaagtgctgggattacaggtgtgagccaccgtgcctggcctgttctcagggtctttatcctctctttagcaacatcctcgtggcaatcttggaagggtcttactgttgtccctgagaggttctgtgactggtccctgtttgctcagtgaatgaggggctgaccttggcattccagccctggaggtggcttctcagccatcccagcccgtccctgaccccactggcttaaagctcagagaggccttccccaccccggatcccatccactgcagtctgcaccccagctaagcttggctttcttcttctcccccaccctcttccacgtggctcctgactcctcagtcactagaggatcttgaagaccaaaaacggaaaaagaagaaagagaagatgggattcggctccatctcccgcgtcttcgccagagggaagcagcggaagtccctcgaccccggcctctttgatggtaccgcccctgattattacatagaggaggacgcggactggtgatacgcgctcccctgcgcctgctgcccgcaggcgtgtctgtgcgtgtgggcgtgtgtgcaagcgagcgtgggtgcgcgtgtggccgtgcgtggggtgcgtgtgcacgtgtgcgctggcacacatgggtgctgggtgtggccgagcgcctctaacaagtgaaaacacgagtgtgaacctctctcccctgcgtcgccacctctgtaattgatgtacataccgcaaaccgtgtgtgaacctgtcaactctctgtcgtctttggagcgatacagttgtgttgttaatctggtttattatttttcttcagtgtttggtttttctttttctttttgtttggttcgtcggtttgtttttgtttttgtttttttccccctttctcctcccctcctcctttttatgaaacttgaaaacttgaaggactgctgtgtatttgtaaataacaaaactattgtgcactctgtgcttgtaaatgtccctcgtccaaaccgctactcctggagcccgtctggcagaggatgtggtctgtttttgatgtcccccctcccgcccccctggtgtgaacgtgtgggaccagaccctgtcctgggggtgcgcccaagtcactttaaccacaaaacgccatcgtcgtcagggtaagctctgctctctacaaagactcgcgagccgggccaaggggccttgtcttggctgggtttgtcagaggtcaaaccggctcttttaaacggcctaccagtttttaaattgcattgccgtttctttctttatgaaaaaaaagaaaaaaagaaaattgtttcatttaatttatttgcacaaatgctgaaaacttattctatctaaattattacataaatattggaatgtctatttttccatggggtgggcgggaggtgggtgtctctgttgacttgtctgttctgttaccatgctgctacccaactgtgcaaagtagtttagggtggccagaacccagggaccattggatttcaaagcttgctttttctgttggttcttctctctccttctctctctgtctctcccattctcctgcccatgcatgaaaggatcctccaccttcttcccacccagagctccctccaggcctttctctatatatttatttatctgacatacagaacacgactttagtgagcagagtgctgacagtcatggtccccttctttgggtctgtcttttgagagaggttgagttcagggcaagacagcctgccacacatccaagggtacgaccagtgggaccctggcctgagtctgttctccgaggggcctccagcagcttctgttcctccctgcagctgtgtctttcttgtcctgggtttaggatgcaggtgggccaggcaggtgttgttaggggaggcacccacttcaaaaggagggccacagtggggacacagagtccagcacctgagccctccaccctccccattctggttggttccatcagccacacttagaatctcccaggatcccttggactccgtcccccaacttgtcacagcagcctgagcctacccaccccaggagacaagagctggcaggaacatctgcctatatggggggtggcgttggccccaaagaggcttcaccagcaaaggaactgtgtgtattttaatgccaggggacggaggatgtgtgagctgttcagcaaggtctgcccaaggcctaaaactcaatttccttattcttttgcttctgctcgtccttaacaactaacagctcaacccacacctctagacaacagtagtcgtgctttctgctaacggtgacattttcagctcttaaaaagaagcaaggagattttcaaatgctagagtatctctatcagaaggcataggacattgtgtccaaagtctcaagaacaaacaacactttccttctgacctggtccaaaagtcagcaaacagcaagcaggcagaggccctcataaggacttttctgtcctcctttgaccaaactgtttaaccgagcctaggggtgacggggagcgacccaagctggcatctttctctacggagacagattttagaaaatacttttcttgcccatgaatttcttttctggttgatttttatcattttccctttacttacaagaaaataagattgcaaccactcctgctaatgatttagtagttccttttcatttcagtttttgtaaattaggagataattctaagagttactaaaggatgatttatttaagagaactacgtcaaatagcgaatgagttatgggtaacattagacgaaaataacctttcccgtgggaaaggtttctcgaaggcatggatgcaaatataaaatattaaaaaaaatctaaataaagcttattttaaaatatgatcgaattctatgttatttgattgcttctatttggctccgggtgggaggctctgcccctctgggaggcacaggctggcatgacctgctccttggacttccagggctgggttctgggaggggggatgggaggggccgaggaaagctggctggattcggggcccttggaggggccgagccggggtagcctcccagaagcatctcgcctctgccgccctgactgtaatttggagggctaccctgtggtccaaacgcaccacccccgacctggcaccctgcattgtggagcttagtggccccagtcagctttcgtctgcttccttctccccctgagctccttccagaggccccaaaggagcctgtgctttggggcgtgttacttcccgcagacctccgtggacctctgcgcgtcccacgatcccaccctccctggaggaccgagaggagcttcagggagatagagagggagccacaggcttccttgattgaagccagagtgagccaggcttttcctagccccaagagaaccccccagatacaaaactcaggcctcccccagcgagactccactgtatgtcccgagaagagggtacccgggttaccccaaagcctgacatagtcagtaccctcaatctctatatctcccaactgaaaaaaaattttccccggcaataagactgatggagggctggcttttaagtcccctcccacctctgcagcataaagctatgtaatacagacacgatgccgaggtgaaaatgagcccccagtgaggatgcaaatggatgtggtaggattgggaaggccaggaaagccctgggtgacaaggaacttagggccatctaccccagcagttctcagcctgaccacaccttagggaaaaaaaaaaatactcattccaggccatattcctggaattgaagtgtatttaaatctcctctggtgattctaaagggttgccaggattagaaccactgagctgatctgaggagggcaagtgtggccacacgcatgcccctactcccctctccctggccccatgcagacatcaccaatcaattgaagagcccttcctgcccatcccgaagtggcctctgatttctcactttacatagcctcagatagccacagccagtcaatcagagttggcatacaaggataaagcctttttgccctctcaaaactaaccccgtctctcatgcgggacatatggcaaaaactttggcccagagaggaatgacttggccagcgtcctagctatcgtgcctctcatcctgggaccttctcaagagccaggccataccttatttgggtctttgtagctctactcaaaagccaccgtacctccttttttaaaagaatcttctccagggaagctgaggcaggagaatggcatgaacccgggagttggagcttgcagtgagccgagatcgcgccactgcgctccaacctgggtgacagagcgagactctgtctcaaaaaaataaataaatatttaaaaaagaatcttctccaggaccttgctccaaatggtccaacttcaaatggtacctattagaaattggagtagggctgcccagggcatccagggccagctgcacaggttgggcactgcattactccagaaggtgccattctccaggctaccacgtgaatggtgtcctggtttttcaatacacaagctgcatgactgtactcagtggcccgtctgtgtgctcctcctacccacgttgcaggctaaaacagctgtaaccaataataacaataataataatatctaacattgattaggcatttaccacaggccagggtccatgctatgcactttacacatattaactcagttaaccctcccaacagcctgtcattgatgagaaaacagacgttgagtaactcatctgaggtcatggagctgggagacaatagaagtgggcctcaaactatggagttttggctacagagtttgtgccctgaaccactccaccgtctgagcagtgaggggctgccgccaagcagctgggccttctcccaggggggcatcttcagtgcatcatctgggcctggtttcaaggccccttgcccaccagtagcctctgacacagctttgcactgcctcacttttgtgactcagtctgtttccatcagccttttccccgcaggcccagaaagctcacccctagagaggaatcagcgggggaatcagagcagaaaccggctgctgtccagcaccagctctcccttcctcttcctggctaagtcaggagcagaatcacctccactggccctgcagtccaacccctggctgtaccagagctgcagatcctgaggggtagtgcagcccccaacacctggggagctctgtggcacccttccccgccacagcatgagcctgcggtccaggagccgccccgcacctgtgacaaacggtatcgtgcccgtcactcaacctgggctcctggggaatccaggcagagtgagcctgaaccgtgggggacatcagtcgtttgacaaaatgatttttaaaatacctctgggccaaaagttagccaagtgtggtggcacacgcctgtagtcccagctactcaggaggctgaggctgaagcatctcttgagctcgggatgtcgaggctgcaatgagccgagatcgagccactgcactccagcctgggcgacagagtgagaccctgtctattatttataaatgaataaataaaatatctctgggttttccccaaaaacttgcattttcccagacaccccagatggctcctaggctttttccagttggactccactgggcggggcaaaatatgccccggtccctggcccccacctgttcccattttccagtggttacagaacctggtgataatgaagaatgaatagggaacatgtatcagcttattctttataaaagagtatattcgtaattctgcattacaaaataatgcccccaaacttacaaatatcttagcagttcgtatgttagaagttatttaaatatcaaagttatggcatgtcactaaaatgtccccctgtgggcaaattgagggtataagtctgggatggcaaataggatatggatatttctctttttatttttctttttttttcttttttgaggcagagtctcactctgtcgcccaggctggagtgcagtggcgcgatctcggctcactgcaacctttgcctcctgggttcaagcgattctcccacctcagcctccctagtagctgggactacaagcatgcatcaccacacccggctactttttgtgttgtttttagtagagacgggagtttgccatgttggccaggctgattttgaacgcctgacctcaggtgatccacccaccttggcctcccaaagtgctggaattacaagtgtgagccaccgcacccagcctgggtatggatatttcatacctgaaccacaattggatgatgtctcaaagtcccgtggctggaaaatatgcaaatatgcagcacggtactctatagggcaacaaactgaatccttgagaaaatgatcccaacaggattgatccaagaatagcagcaaggggaaatcttggcctattcatcctgaaaatggcaggacctctgatgacctagcacgtgccttgcaaggccttgtgacgttgccaggctgtgtacagaaaccatgcttctggatcacagaaaacactggctggtagcttgtttgcatttctgagttttaggttttgaaaattccttgttgctttcttaatggttaccagtaagtagctgttaatcgcaccaatacaagagaacctataaaattgcgtgccttgcttccagaatcctcaacggaagatttgccttcgggaagtcatttttgcccccatccagaggacccttgtagcccaccaatggcttccctgtcatacctggataatcgctcccagttctggccccacatctgattctaagcaagttgtttaacctatgaacctcagtgtactcatctgtaaaatgggtgtaattaccctcccctcctcgtaggttcagaaatgagaactgaatgtgtttttggagtctgaaaagggctggccccatgattactattctctgtgatttgtaacacatcttgagcctgacagtgcctcaaatcaaaacttgtccctggggtaaaatcagggcatcgggctgtgtgtgtgaagttcctccatctgccagggtctgtgaacaccagccctcagagtgcaaatgcagttccagcactgctacagaaaagaatctgggctgctctgcctcagaacagggagggtttgagttatttgcccctagaatccaccagctctgacagcattctgtctttctgaggtctgagtagaaacacttagacgctgctctcagaacccagggccagcctggtctggaagtcagggctgcctcacttatgcagtattttctttgtgccaagcactgttctaagctctttccagacactcactcgtataatccttccagcaactctccaaaatacatgtcatccccagtttacagatgaacaaaccaaggcgcagagaggtgaagttcttgactggagtcacacacctaggaagaggtggaactgggattcacctctagcagtctggctccagagtccatgttcttggtaactttgctgtgtagtctcaggtcacccactggccccaagccccctctcagggcctgctgagcaatagaaagcttcagagaacatcagaatgcaagcctcattagtaggatgaggccgggcgctgagtaggccagctttttaggattcaactccttaatccagaagaggaagagaccggcaaaatatggggtttgcaaactgtgttccatggaaccccgaaggggttcctcagcagtccctcaaggggttgccatagctggcgaaagaatcagcaggcagggctccagcctaccctcagccagtggctctgcacttacctgttacacactggacttccgtgtacgagtccacgtgaaaggtcccatggtagagtgagtgagaaggaaagaggaagagaggaggtttgagaagcacaaggagatcagtggttgtcaaacctgacctagctttgggttttaaagatatccattcccaggccccatcctgtagctaccgaaccaaagggtctaaggccgaggccctgggagctgtgtgcgtattgaacaagctgcctggtgtgggctcagtcgcaggaggtcacatggggcagagactgagggtggcagcgtagtgcccgtgggttggagggcagactcgccagggccatcacaaggtaggttgaggccaccttcctggggcaaccccagggtccccccagtaagggaggaaacttacccaagccagaccccaagctgccccccaggcaacctgctgcttggggcctttctaggccccgctgagcagaggggacgggcactctggagtatctgacgccccaggccagcctcagaagcctgcagcagcacccacactgcaggcacagagaggttccccgagtctccgagagatgcatagccaggaagtggcagaagcaggagtcaaacctgagtgagatctgagttctgagcctgaggtccatccgactcctcctgacctgtgtctgactgagacttctgtccggtggacctgctggcctcggtctggggccagtgatatcccatggacaccagaccatgagccctaaactgggggcaagtcagcccaagctgctgcactctgggaagtggtcagatgtggagctgctacagaggggcctgcaggcctctgcccacccctgcccttgggctcctgaggaggcccagtcttcttcacccagaagccccaccacccccagcccagcgccttcagggcccctgagcccggctctggactcccagtgttcaggttggtcaaggactcgctgtgtgaccacagccaagctggtctccctctctgggccttaagctgtctctaaaacagaccaggacagtggttttccacctgtggcctgtgaaatctgagaagtccctggatgtgcctcagaaggcggtcggcaagggagaggctgcagccaccgtgttggagggtccctccctgccatccgcctccctgccctttagccctaaactccagtgtattcggcttgttgaaataggtgtgaatgacgggtctgcagcatctctgcagctgagaggcagtatgtgagaaaaccagggggcacatcatctccaagctcctccaggggtctctgggctgtgatcaggaagggagaggggcaccagcctggtgaaggagtcactcctcatgggtgtcccccggcttccctgctcacccctcctccctatcagtgaggggcagtatgagaccctccttaaccctggtagaacaggaaataggaaaatggggcccctggctccccttctggaagtctataagacaaggccaaggccatgaatgtcccccacgaaccacaggacaactgcattgagcaacgcctccccaggtcacagcgatttacagttcacgacactctttcacggggagatgggggtcagggttaagagattacatcctgggcaaactccctgggtttcaacctcagtcctgacgcttgttacctggtaaccttaggcaaaggacttcacctgctgtgccttcgtttcttcatggggacaataggggtgaaaagatactaggtcagagtgtggctgcagggatgaaacaggccaatatgtatacaaggcttagcacagggcgcaataaaccttagccaccatgatgatgaccgtgatgatgacaatggcaatggtgatctcatttcagcctctcgccggccctgtgaggtaggcaggacagggccctttgtacagatgagaagactgaggcccaggtaagttcagcaattagcccaagctgcaggggccagcccagaataggaccagagggagcaagagtttgggagctgagaggggtgtcagtggtctctagtccactcccctcatattgcagatgggagggtgcttgaccacagcccagcagggcatcagtgtctgaactggttctggaacccagggctcctgccttcctggccagtgctttgagctgcctccaaccataagactcaactagggggaaaaaaatccctgggtcagtaagttttggaaacactgcatcatatctccaccccttatagatcagcacaaccctttcacttattaaggctctgacaagttctgcaatgaaagaaaatcttctacctttacccatctagtgtttcccaaacttacgtgaccacagaaccacaccttttactctcattcggtggatcaccgactggaaactattgggacagatgacttcttcgggcccttcagctccactattctgtgctttgagggcgctgtcagtggttctgtggcgatctctaagcatgccaccattatttagccatgagaagtctctgtggctcatatgacatccctatgggcctccagaagggaggtgacagacaccaggtcaggtgtagtcacagcccctctatctcagcatccactttgctaagaaaggacccaaagcagtgcacagcacccacatgaggcagaagagcccgacagattggcttggaaatgccggtcccagggtgttcattattttcctgctctcctaggtcctagatatagacagaggggctgagtctgttggcacagggacccaggggatgggcatgtccatgctgccagggtgtctggccccacctgccctccagagcacttcatcaccctttggtggctctgagctgcctaattcctttccctgggacaggccagagatgtcagagtcacatccaaattggatccgtgctatactaggccagcttccttccttattaggaggctgatgtctgtggaggcggtgtggagcctgtggccagggcatgtggaccaggagggaaggaagcagcctctgacagctgtcactgtgggcaccagagctgtggtggcaaggaggagacttgagacaagccaggaggaacttgagggcctgtccccaaatggagggttagaggtaacagtcccgggtcactgatggcagcttgagtgtgtgagccaattccaaattccttgcatcttttcacatgtgtgcaagaaacaaactcatcttagtgacagcctgagcccagcagaattgatcggcctcctacagggaggggcttgaggaaaggcctcggcttcggagctagatcctgaggctcaatcccagcatcggcacatgccagctgtgcaacaccgagtccctttgagcctcagtttccccctctttgaaatggagataaaacatattggctgttgcaaagataaaatagtaaatggagagacgcatccaagacaccccagctgcttctttcagggctgcagaggcccacgtgacagaaaatctctgcttcagagcaggaacccaggccctgagtctgggctgtgccctctgcacacaattgattggcttttctgagctccacttttctcatctgtaaaatgggcccctgggaatcttgagtccccctctctggggaggatgcaatgagctcatgcttactagttgtaaagcaccaggcaaacattagccgtcacgactgcactgcctcgcgagcaagctggaattacggtcaccacctgctgttttagatcagcacccactgcaaacatatattagggtgacaatgacaaggacccaccttgtgggctctctcagttgccagcattgggctggacacttactcgcctcatttcaactacgccacaaactcagaggcctgtggggaccctgcagataggcgggtcagtgacgtggccacgtggggccagcacgtgctgtagcaaaaggaagcagctctgctcactccagcgaggctgctcggagcaatgccagcctggtgtttccagagctccagatcttctagagaagccaaatatctcacataatacaccccaagtctttcatattgacaactaatttttttttaatttagtgtccattgggggaaaatttccaaggccctaatttgtctcagggccaacagctctgtcacctccagtctagattctctctctgtggacacctcgtgctctgacagtccctggtcttcccctgcgtgtggagtccccgggcctgcctggctgtaggcgcccatctcaattcaccaccatcctccttcactggagggccctcctgtcctccactccctgacggccaggcagcagggctccacgcttgtttctcaacccagagaagtgttcccaagacttagagtgtttggggagtggcagtggagaagggaaaaggggtcttcgctcagcactgccctcggaggccttgagtcactgcaggaatcctgagctccaccgctcctccgcaagggctacacaggaccaggtcagctgcttgcagccacgtgactcagttgttttttatagtcactaccggagtctctgggactcagagatgggggttgggggtttcaccttcaggtgaagatgttgatgggcctgacaatagggtgactccgtattatccaagaaatcccaggaggctgcgcagttatcagcatgaaaagcagctgcaggcctcccagggatgcggacaggggctcagaatgaggaatggggacaaagactggcttcatgggagcaggagaggtagcagggggtgtgaggaaagctaatatgacttgctgacatttactaagtgcctactgtgccaggcatggggtaggcatttgatgtacactcattaagtctttcaacgaacactgactgaatgtttcctatatgccaggtttagggcttagggctgaggatgcagatgtggatgatgagataaattatcctaacatcatcctcaccaaagtcacgtaagaaatttggtgaggaaactgaggctcagagaagtaacatacatagccctaagagacaaaataagtgatgtgctggatgcggtggttcatgcctgtaatcccagcactttaggaggccaaggtgggcagattacttgaggctgggagttcgagaccagcctggccaattccatctctactaaaaatacaaaaattagctgggcatggtggtgcgtgcctgtaatcacagctactcggggggctgaggaaggagaatcgcttgaacctaggaagcggatgttgcagtgagccgagatcgtgccactgtactccagcctgggcaacacagcgagactccatctcaaaaaaaataaaaaataaagtgatggaacgaggccaagaattggggtccaacagactgcacgacactgctttccaggcagatatgattgaagctgattaaactgtgagctgttaggataaggctttgttctctaatttccagaattcaagggctggagggaggcagacaaggcggggagcagggatcacgattaaaggtcacctacaaagggagagaagattaattcacaaaatgggaagaaacctcctaggatcctttgccccatgctgtggctctggctgaacatattaacagattctagaagggcatcggtctgcagcgcgcatgctgttcctctcagctgccgctacgggacctccagttagaacgtttcatgaggcatgattggaaaagccaaaactggtgccagtgttccccttgccattctcctataggtgtctaagttgcaagaattccccccaccaaggacctcatcaaagctgtcttcgttctgaaggaaattaaatcaatgctgctcgtaaatgtgtttgctgttcctaaactggcctttgtgcaatgcatagtgaaagccgctcaccactggcttaagaaactcccgggaggcagttgcaaagctttttgagggagatcggaggtgggacagtttgcatgaatcatgcaagatagtcacatagaagacagcacctccaatcacctcaccctggtctagaggcttggcatctggctcagtggtgagttcctgtcccggtgtgcaaataggcaaggattcaccaggcagggtctcccagccgtcacaatgcccagtgtccataggcgcctgtggaagaggctcagctgagccagaaagaacctaggttgtctggaggcctaaggaggaactgcttgccagggagggggctcattcaagccaaagaggcaaaattggtgaaaatctagctagggagtgaattaatccagttaattaattattaaagtaataactagtcgttaaattgtggacacaagatgaaggaccttttgtcacaattcaatactgttggcttatttttttttttagtgaaacccaacataatttcagatattttactaaacaatgtgaaagtggggttggggcacagctgatttcctgaaacccacagccatccatcgcccccagctttgcctccaagagctgtacagatgcacacgtgcccggcctctgcatgggtgcgtggagaaggatggtcttcttgccctggccacctgtgtcaagatccccccctcacttctcatgggatccacctttcagggctgcccactggcagagaagcctgccgggaaaacatgtcagaaaagaggagtcagtgtgggacttgcccaaggaggccagcagctggagaaagatgggcttcggctgcacttgcaattgagactataagaaggacttcccaaatgtgggtgctgctgcagcagtggaacaggttagcaaggaagaaagaggaaagcttttgatgtatagatatatatgtaaaagcataaagtcattgtcattggataactatgtgtttgtcttccctggacctcttagcagcttcctcctaagtgcataaacttagagaatacttgtcaagtacctgcctaggaactgagtgcagagcagtggggaccctggccaaccccaggatctcaattccctggccctttggaaaattttcagagtgtggcaggagggactgaaggaggaggatgtcctccgaggttgggagaagggtggctggtcatgggaaaaagcacaagtctaggcctttgcaagacggtggcaccaaaatgagggggcgcccatgtgattttttaaaagtataaagcagttattgttggtaaaagcagcactctgctggacttttctatttactttatgatgtcgtaaatagggacacgttggggtgggaggtaccaccactgttttagcccagggcctcccaagggtgagcctggccctggggtcaggggtggtgcaggttggtggcagggcccctgccacctcgctgcccaccaagggtcctgccatcagcccccagcagccacagtggtgagtgactgataggctctcctcctgatgctcttcacacccacgctgtccctggtcctgtgggctaccacagaagcctttcacacatttcataagtatttcatggggcttgtgactgagggatcagcaaagcatctacatccaacagggcagccatgatcgggccataaaaagttgttttttcacattatcatgaagtgtttaaaaaatgagaattcagcttttggagctacatgtgctgatggaggctcccctgccacttcccaagggcagggagtgttgacagtagttggctgcctgaacagagctgggctgggctgagaacagaggccccggggtagaagggagtaggaccctccctgtgccttagggcatgctggggacgctgggagcagctacactcggtgctccccagcagcttgtggttggaggccagggatgctgctacatgtcctacgatgcacgggacagccccatgacaaagaaatctggccccaaatgccgagtgccaaagttcagaggccttgccgtaggcagagggacaagagaatggtagcatctactgcataagaggggccacaggtgaccctgctgtggctggaagaggcgtggacgaggcggggttggcagaagatgagaccacagaggaaggcctgctccctccctccctccgttcctcccttcctgccttcttttactcaatacttagagggctcattcaattgcaggcagtgctgggccagggctggctcacacaggcccacggatggctctcttcccaactccacgtccagtgacagcctgccggtcactgaaattggccacaataggagtatttacaccacagaaattggcaagcaaatgctaaaaccagtgtacctctggaaaatataagagccggttgttaaacgtggttgggcccttgctagggactagagatgtctagggagcaaaaccaggcccagcgcctgctcatgtgcagtttatggtctggtgggagacacagactttcatcgaataattacacaactgttcgtttcagctgtgagagatgtcatgcaggaaaggttccaggaattaatgacagcgtgtgtgtgtgtgtgtgtgagtgtgtgtgttggggagttgtagggtacccacactaggtgaccaggaaaggagtccctgaaataatcagtattgaaacagagccctgagcctgtgtaagcttcaccaggcagaggaaagtgacaggccgctgttcaggccaagggaacggcaggtgcagggattggagagggggaattaggggcatcggggaaatgcaggaagcccagggtgccaagggcaggggtgagaagctaaggatgaagctggcaaggtcggcctgtgggtcacagcaaggaccttgggctttaccagggagccattgaaggatgatgagcagaagaggtccctgggaagataccattttttaaaaaaatttcctctgggcttgaagaggatggaatgaaagagaaagagggaggtagggtgttgagatacagctggagtgctccagataggagatggtggagccaactgagacaggggacaggtgatggagactcaggagtgatggaattcagcaggggacgttgcaaccttagcctgccctcaccaagctcactgcctcaactctgcctcagtggcagccgaggtccaagtgctcagcccccctatctgaggtctgagaccctatggggcagcaacaggcccagccaggtgcagggacacattcagccacctcacttgacctccagggaagcctggttccctgcgccacctccaactcagacacacaagacacatttacaactaaagcttttctatcaggctccagggagctctgcatccaggcacacatttgaccccagggatgcagatgccagggaggtgccaatgtgcttgatgctgcagacatcaaaagaggctcagaagcccagggcatgggtcactcagccacaggctgggtatagactcaaaattttaaatagtaaaagaagaaaaaaaattaattaaaatgctagagcactaagtctttcccatagctgctgccaagggtgtctgccaatggcactctgaggtcagggacatgcgggaccaggatgaagaattccacctccctctcactcgccatgcagggtgggcataggagaatttacaaggcctttacctctaagcctctgcagtttgtttttgtttgttttgttttgtttgagacggagtctcgctctgtcgctcaggctagagtgcagtggcatgatctcgactcactgcaacttccacctcccaggttcaagcgattctcatgcctcagcctctcaagtagctgggattacaggtgcgtgccaccatacctggctaatttttgtatttttaggagagacagggtttcatgttggctaggctggtctcgaactcctgacttcaattgacctacctctgcatttttaaccacctccctggtagctgacatccctgatctaaagaccactctaggagcagtctccctcctctaagtcccagccctactgcaagactgtgggatggaccacgtgaccttgagggcaccatttagccctagaattctgaatcccactgggtgggaggcccaggtgaccccattcatgatgccatttgagcagcaagtaccagggtgctccaaactcttcggaggtaggcacctttccttgctctggatggctcctagacaggcatgtggactcaagcctgtgcagccccttttagttgcaaatgtcaacctcaggctaggtggaggggggactgtttcagggcaaaaatggtggaaagtagtacatagcaaaaccttctcaaagcttctcccagacactggtgaatggtgcactgggcctgtccggccatcacctctggctccaggctgcctgtgtcactccagcccagggctcacccccgccaaagtctaccatccttccatcccgcctttccatgccacctgtccccggtagcttagtaagcattaggcatgagtgtctctggtcatagaatgaatatgcaggcactgtacggtttggtagagcagtccaaaggatggacagacacgcagagccccaagttcagtggcaacacccatgtgaacatcggcctgtctttcccgatcacaggcctttggatcccatcaagtctgtctcggtgcttaggcctgtctctctgtctctctctgtgtctgtctctcactctgagtcatggctggcttcaagttccccagcctggcaggcagggccaggagccatttcccagcctgtgagagtatcttcccacaccccacacaccatcctgcctcttgccagtttgagcaatccttgccaatgttatgtaaccaagcacaggcgttcaagaacaggcgagagggctgctcacataggttcttctacactgggaggcggggaattcagggttgaagcagagctcccacactagcctgctggaaacatcgggggacccctctgagccttcacttcccatctgaaatgtgccctttgcccctttattcctgggggaaggcaagagaaactgaggcttcccaaaggaatatccaagtgaataatggtatcatcttccttggctgtcaaaacaagtagaacagggaagggctgagctggggggaaaggcaaaggaaatggtatttcccataacctggacttttcccatcactgatgacattggacatctccatataccaggccctggtaatacaaatatggaaagacttggctgatgacctcggcaatcactttgtggcagggcagatggacaggccatgcacagcagtgccagcaggaagcagtgtgctgggtggacagtgcacacagccagagggacggccactcagggcagcgtgggggaagacatattcggaagggcctccctctacaaaaccaataaatctggaatgaaacatactttttaatgcattcctggtctcacagaaaataagggaaatccccaagacgtctacagacaaaaaacaaaagctgtaagctaacaccagaacaggagcagtgagtgatcaccaaaggcaaaagctgaggttgtcctggaggcaaatgctgctatcaggactgttatcagggggttaaattttgggatatagcaaagtggaagaacagagccagagatgctgtcattcaaccagagtctctcaaaggggcatgaagtggcccctggacccaggtctcatccccactcctcttctcttccccaccccagtagaagttaatgtaaatcctctctggagaaaggcatctgctatttagacccaaagattcccgcaaattaagatcaaatatgtgttcagcatgagtgaaagtcagcaaaaacaaatagcaaatttagaccctctaaggccttttcaggtttagtaattatcaataccaaatacaaaatactaaatactatgcataaaatacttaaggaaatgtcagatgaaatcacagacatgagcaaacaacaggaaactgtctcacaagaccaggaaaacttgaaagagaaaacagataaaacgttttagaaatgaaaaaaatatagctgataacattaaaaatgaataaaagggtgggttaaacagcagactaaataggtgaagagataattttaaaaatggaaaaaaagacctaaggaaattaccaagaatgcaacgcacagagatgagatgaaaactaaaggagaaattgctgtatcgaatacactagccactagcccacatgttcttagatttatatttgaattaattaaaattaaatacaactaaaactcaggtctttagttgtatcagccacattttacctctgccattattattttgttttttttgagatggagtttcactctgtcacccaggctagagtgcagtggcacaatctcggctcactgcaacctccacctcccaggtacaagcgattctcctgcctcagcctcctgagtagctgggattacaggcatctgccaccacgcccagctaatttttgtatttttggtagagatggggtttcgccatgttgcccaggctggtctcgaactcctaggctcaagcaagcctcccgccttagcctcccaaagtgctgggattacaggcgtgagccaccacgcaccacccactagccacatttattagctcataaccacttgtggttaatggctatcctattggtcagtgaaggttatagcagattttcatcaacacagaaagttctgttggacagcactaggtcacaagataggaaaaaatagaattagaaagtccaacttatatctaactggaatcccagaaggagagaaccgagagaatggaaaagaggtaatattgtaagagataatggttcagaatattcaaaaaaaggagtccagagatacaggaagcacaattatatcattcagaataaatttgaaatatccacatctagccacattgcaatgaaacttcagaacaccaaggacaaaaagaaaaaatttttttgagacagagttttgctctgttgcccaggctggagtgcagtggtgcgatctcggctcactgcaacctctgcctcctgggttcaagcgattctcctgcctcagcctcccaagtagctgggattacaggcgcccccgaccacgcccggctaattttggtatttttagtagagacggggtttcaccatgttggccagggtggtctcgaactcctgaaatcaggtaatccacctgcctcggcctcccaaagtgctgggattacaggcatgagccaccatgcctggctgacaaagagaaaattttaaaagtagctaatgaaagaacaattcggcttgcagtggacttctctatagcagaaatgaagacccacgatcatgaaacaacatcgtcaaagcgctaaaacaaaaggcaaactctcaacctaaaaccgtgttcccagcaaaaccctttgaagcacaagggtaaaacagactttcttcagataggcaaaagttgtaacagctaactaccaaaacacttgtaatcgaaaaatcttttaaaccatgttcttcaggaataagaaaagttattccagaaggaaggtctgaggtacaagaagacatgatgaacaaagaaattggtaaacatgtaagtcaattattttaagcaaacgttatcagtataaaataatcatcgtgacaatgtctaaattatggggtttcaaaagaggatagaattaaaatcctggatgtggtagcatggaagtcaggaggagtgagcagaattaatatattttaaataattcttactatttaggatggcattaggatattgaacaaccctaggttttattaaggtaaataggtatagtgacttttcaagggtaatcattaaggccgtggttctagaacttgagaatacctcagaattatctggtgggttatgaagcagaccactgggctccacccccagagtttctgttccaggagatctggggtacagttctagaattttcatttctaccaaattcccagatgctgctgatgctactagtccagggaccacactttgagaactacaactactatactaaaatcagaagcagagaaagcttaacttccaaaccaacggagggtggcggggaaatggaatgagaaaacaaaccaaagaaaaaaataatcttccatccagaccagctctgtccagtagaaactaatgcaagccacatgtgtaactttataccttctattagccacatttgaagtaaaaaggaacaggtgacatgacttttaataatatattttatttaactggtatacccaaaatatgatcaatatgttatcaatttttaaatgattatgaaataatttacattcttttttttttctaccgtcttcaaactccagtatgtgttttatgcttaaagcacttttttctttttttttttttgacagggtcttactctttcgcccaggcaggagtgtagtggcgtgatctcagctcactgcaacccccgcctcctgggttcaagcaattctcctgcctcggcctcccgagtatctgggactacaggcatgcaccaccatgcccagctaatttttttgtatttttagtagagacggggtttcaccatgtcggccagggtggtcttgacctcaggtgatccacccacctcggtgtcccaaagtgctgggattacaggcatgagccaccacacccagcccttaaggcacttctcaatgtgagctagccacattacatgttctgtaggcacatgtggcttgtagctgctgtactggacagagcagtctggacagtaagtgacatgggcccgcaggggacagaggcctccactccgtcactgagtatccactctatgtcagacacaaggctgaacactttgcacacatcatttcatttcatcctcacaccatcctgtgagattaagcgttcctatcatccccgttttacagaggggaaaaccgaggttgagaaaatgtaaaacgcttccgtgagatcttttggttgataagccacggagctgggattcaaacccagggctcccatattccagtgccagcctctgaacgtctaggccaggcgtttctctatgtggtcttttgcaccgggccaaaaaactttgtgggctttaagctttaggctttgtgggcctgtctcaacgtctcaactctgccattgtagcatgaaagcagctttagacaataaataaacaaatgggcatggctgtgatctaataaaaactttatttagaaaaataggagggagggctggattcggcctgggaggccgtagtctgctgacctctatgctgggccaacacaattgcctctgtaaggcctcatttaggggagacgtcaatggtcacactcagtagtactaacattctgtgggtgggggggtgtgcatgcgtgcatatgtgttggggtgggtggaaggatgcacagcctctcgttccaaagtccacagtctttctagtttctggaaggatcccgagtgactgccttttagtggtagcttctcagactccaccagggactcagccagcacccgcgactcggcagcccctccgctgagcagcctggccatcaacatgagttattccctctctcaagactgagaaggagggaaataaaagccaggattgatggaatccggacataaaatctggccccataatgcctgcattttggaaactgcctttaattaatggtttatgaccccaaggcccccctagactcctcccaagcccttctgtcacgtcgtctcgttggtgctcagtcctcaggggtgggggagaaggaggcggtggtgaataggggcggtgaatagctgtcttgcagaaaccaaaatgtgtggtttgcgcacatgaacccagcctggcctctggcattcctagggcctggactccataaataatgcgagctgtaaagccagctcccctcacagccctgaggcctgctcactacagaaaataaataacccacacacactcacaaagacacacaggcacacgcacacacacgctcacattgcacaccagacgtttgccttttctgtttgtccacgtatctgttatcccctctctgacctcgactccctctctccctctcctcctttcaatttactttcgcatctttattgcatctggacaccctttctctccccaaaccctcttctttgaaccttcccctcttctgggggactcaggagcagcagccaacttctgctcccatctcctttctctccttcccatgctcctttagctccctttcttggggagacatagccaagggctgcagacaccccccacccacccacctgggcacagaacggacagatccaccctcacctcactgagagccccacccctcccaccttgaccaggcaagagtccagcagggacagtgaatttctgccctgccaggctggacaaccaggaggacttgttccctctgaaggcaccaaagctgtagccaggaatgtagtgggaaggaagtggctgcagctaaactctaggtgtggccaaacagtgcccaagccccaggagaggggccccttattgccaacaatagccagccttgactaagtgcctactgtcagcctgaaaaaacagacatcagaaaaaaatatctcctatatgatgaatgtatttgggagtaagcataaatggattagtctctggaagtatagctgtggcaagccataggtgcgtctggagaggggacagcaaagggaagcttttattggcaaaaaaaaaaaaaaaaaaaaaaaaaaaaaagagaagttcacataagctgcttggaaacagacttcattggctgcagaggctcaaagctagagttggcatcagttcattggtggagatgacgttactgggcagtgttctttggagaacatcttacctgaattgctgcagtcctgaagaaggaatttcttgggggctattttagaaagtccttgagacagtccttatctcaaacatgcaagcatgagttcccctccttcgtgatttcccggctctaattcttctggttctgacaaaagtgatttcatcctggtatctgcaactttcacacccccatagcttcgcattcagagtttataacattcatttcaagctacgaggcagatattctcattattcccattttatatatggagaaacggaggcttcaaggaatctgcctgatgctgaggtctgttcaactccaaagcctggtccaaatggatgacaggggccgtgtcttggaactttgggtaaccagatttggccacatatcacctctcctcttcccagaagcacataacagaggtgagactcagctagcagaataaaacagagtgaagccagccaggctggaggcctcccgggggctctcagctctttcccatccaggaaggatgccgtgtttcagtgcctgttccaatccctatagaatttggagtcctgtgcctgatccaaaagacttccctgcaagccatgccggtccgtgggagccgggcaccagcactggctgccggcctgcaccccggcctgacagccctgtcacctggcaggaaggtggggccctggcggggctgcagaggcagctgctgccgtttccgcattcctggcaccatggcaacaggaggccactcagacgggtgacctgcacagagctctctgcaacctctgccatttccttgggaaaaacaaagggcttaggctcactgagaagggaaacgtgataatgttggcagtgacctctcaacccatacttgtcccagcacggacagcccgtcacactcacccccgctgagtcctcacggcagcccacagaggaggcaggcagcagagaatggtaccgggttagctttacagaggaggaaactgaggcacaaggtgtttgggagacaggttttggtggagatggggatgatggatgagtgtgtggtcaccaggtggatacagtccttttcaaagagtccctcaaggagtttaaaatggagagagggaaggccttgtggggagggggtttgtaacttgaaaaagtgagatttctaggcttttttctacatatcaaacatactatagtcaatgcagaaaacttgggagacagaaaagtatgcacagtcacaaatactctcacactcacacgggcacattcacacacacactcgcacaattacctatcacttcttttccagagacagacttttcatgttgatccatctagtactttacatatttttatatactagattttctccacctagtatattgtatacacacacgtgtatataataattatacactttacatctacatataatttttaaaccacagtcagggttacactgtgcctgctgtgttttgttgttttttgttttttgtttttgcaatggagtcttgttctgtcgcccagactggagtgcagtggcacaatctcgacttactgcaacctctgcctcccaggttcaagtgattctcctgcctcagcctctggagtagctgggactacaggcgtgtgctaccacgcccacgccgggataattttttgtaattttagtagagatgggatttcaccgtgttagccaggacggtctcgatcttctgacctcgtgatctacctgcctcccaaagtgctgggattacaggcgtgagccaccgcacccggccgtgttttcctttttcatttggcagtaggtggtggatgttttcccgtgacaggactttttattcattgcacatattccaacatatgaatggagcgtcattccttcaaacaaactctcatcaataaccattcatattgcttcctagtatttaatttttccaaagtttttattacaaaactatacatgtttactagggaactttgaaaatacagagacatacaacaaaaagaaaataaccatattctccccagcacagaaaggcagtaactatgaacatttgtgtagacttatcacctattgttttaatgttgtgtcctgtctctatggatggataagcattttttttttacattcttgtaatgatttataatattgaatttcagcagggtcatttctaatcagaggttttgtttttttgtttttttttttgatttttttttttttttttttggagacggagtttcactcttgttggccaggctggagtgcaatggcgcaatctcggctcacctcaacctccgcctcctgggttcaagcgattctcctgcctcagcctcccgagtagctgggattacaggcatatgccaccacccaggctaattttgtatttttagtagagacggggtttctccatgttggtcaggctggtcttgaactcccggcctcaggtgatccacctacctcggcctcccaaagtgctgggattacaggcatgagccactgtgcccagccagtcagagttatatttaaatacttgttgtttctcatggtattgagtttgtctgtttgggtgtgtgtgtgtgtttttatttgttttgttttgttttgttttgttttgttctgttttgagttggggtctcagtctgtcacccaggctggagtacagtggtatgatcttggctcactataacctccgcctccctggctgaaaagatcctcctacctcagcctcctgagcagctgggaccccaggcacacgccaccacgtccagctaatttttttgtatttttggtagagatggggtttcaccatgttgcccaggctgatctcaaactcctgaagctcaagcattctgcccaccttgtcctcccaaagtgctgagattataggcgtgagctaccacgcccggcctgtttaggtttttatcgaaccctcttttagagagattcttttcccctctcaattgagtctctgtaacctgaacttttcatatttaccaggccttgatgcaacgaaccatatatagaagagtggggttagaaaatgttggtggatgaacttttttttttttttggtctgtgagggccattccagaaacagctttcagtgtattaaggaatggagctgggttccatttatcctacgaaaataaatcacccagttgcccaaagacgactgccgctgtgttgtttacaatagtgaaaaattggaaacaaccgccatgcccatcagtaggaggtgaaataaattacggagcctccttctgatgaatcccgcgcagtcaaaaggtaccgcaggtctctgtggagatggaacagtctcctccacagcgaaagtgaacaggcatatcacaaatgcacacacctcaaatgcacgcaccccgtaagcaagcgggtctgtgtgtgtttgtaagtgtggcttttctgtatccagaaaagagtatttaacagctgctgtctctaggtggtgtcgatctagaagaatgatgagacaggtctcagtcattttaggaggtgtatttgtcaaagttaaggacgcgcgcccaggagacaggtctgtgcctttctccgaagatgattttgaggcctccagatttaaaggcgaaaggatattgagaagcacacagtttcatgtaagaggggggcgggggaaaataatcattcgtgcctttgtctggcccagtgaatctgcatttttacataaggtaacatagacagatggggaacatgcaggaaatcgacatttttacataagataaagataaatgaggcaggggaacaatcagatatgcatttgtgccaggtgagcagaggggtgaatactgtgtaaagataagctatccatttacattgccatggtgaattttaacagaaatgctttagggtaaatatctccaagctcgccaggaatttccttgtgggcaaaatatgagggaggtgtgtagcagttcatcttatttaggaatcaaaacggggaggcaggtttgtgtgacccagttcccggcttgacttttccctttggcttaatgagtttggggtcccaagatttatttgcctttcacagtcacgtggggtgatcttcatttactgttttatttttttctgggataagcttttcttcttttcttttcatagattacttttgtaatgggggcaagggcagaaaaacaaaaacgccaaaagccactttgattttgaagagaatacatggaggggaggatgtccccaccaccctctgcctcccgggggtatggcctgcccagcccctgcccccagcagcctcgtcccccagcatggcctgcacttgtgtgttgcagactcggacagccagtgcagccccacgcggcagagcctcagcctgtcggaaggcgaggagcagatggaccggctgcagcaggtggagctggtgaggaccacccctatgtcccactggaaggcgggcaccgtccaggcctggctggaggtggtgatggccatgcctatgtacgtcaaggcctgcacggagaacgtgaagagcgggaaggtaggcaactccgggccccctatgggatgccacccatgccctctgtgagctttacgtacccagaagctggcctgccccccactcctaccctggagtcaggagaaggtgcaatctaggagctagccaatgcaatcagcctctgatgtacctgctcattgtgcctccctggcaaggcagagagccctcagctgcctcatcctgacaatggacccaggtttcctttacctgcctaagggaaagggctccctctgcctgaacagggattccgccccacatcagagttgcagaggtttccatgtgccctgaccccactgtatgaaaggtgggcaggagatggggaaggagccccatgtcaacagaccccctctagggcaggaaccccgccggcagctgtcccagcccccatatgacactccctcccgggggcaggtgctgctgagcctgagtgacgaggacctgcagctgggccttggggtgtgcagctccctgcaccggcgcaagctgcgcctggccatcgaggactaccgtgatgccgaggcaggccgcaggtgagcccaccacgaggggccccgggggaggagagaaaaagtcatcctgaggcctttggtcacacaggtggggtgagcggggcactgtgggctgaaccaggtggtgggggacagcagggtgtgactaagatggtccggggatgcccctgatgagggggcttgggcataccccagccctgctctgggccagccccctccgtagaaagacagacacatggggaagacaagaggccccaaaggccctagtacacccccaaccaatgcgggaacctcacgagccccccagcactcctctgccttccgggaccagcccaagcagctctgcacactgggccgccatggtgtctgctcctggttcttaccatacataacagggtgaggaaaaacggtgcaaggcagagccgaggcaggcagagatcaagtaggcgtgagtgggcttggtgaaacctctcccatagaggagcgggccaggtggagggggcttctcttagcaagcatacctgggatggctgcagggccttctcatcaggtgtacccccgcaggccacccacccccaccgctcataccactcctgctctgcctccggcctgcctgcctctctcctggctttctgtgagcaaaatttgttgagcaggggcagctacagggtaaagggaaggaacccccacccccaccccgccccaccccgttctgagaatgtggagaggggaagaactcgctttgtaaatctgacacttctgttttgcataattatgtccttcactggtttctccatcatttttgtgtagttagttaatcaaacctggtggtgtgtgctgtaatttgcagaagcagcttaggggatttttttagaagcagggtttggggtggaaaatcggctggtttggaagcaggaaaaccaaatccatatgtgtgcaggagaggggccctcggcatgactctagggtggcaggaagtactgaggtgagactggatcagaaacttagggagcgactcagagcaagaaggtgccaggcctcattggcaccatcaggatgctggctcgtctgagacagggctgggctgagggatggggaggagggccatgagggcaacccctgctgggctttccttcctgagggtcccaaaaacaccttacacccagcacccacctcctaaccagttccatccaggaatcccctaaagccatccctgaatcccctcaccatctttggtcacccaagtaggaaatccctcctgcccccttaccccacacccagcagggtccataaacactgcctgtgttcaatgaacagggtggggatgactgcttcatctttcaaaaacttcaggagtctgggctactgcctgggttccccctaaatggggataagcttttcttcttttcttttcatagattacttttgtagtgggggcaagggcagaaaaacaaaaacactaaaagccactttgattttgaagagaagaaatgcatggggggaggacgtccccaccgtcctctgcctcccaggggtgcggcctgcccagcccctgcccccgacagcctcgtcccccagcatggcctgcacttgtgtgttgcacaacacagcccctaaatggggctgtcttagtctgcttgggctgccataacaaaatgacaccatctgggttgcttagacaacaacttacgtctcacagttctggaggctggaagtccaagatcgggatgccagcatggttgggacctggggagggctctcttcctggcttgcagaaggcaaccttcttgctgtgtcctcacatggggaagaaggaagagggagggggagagagtgatgtctctggtctcttcctgtaaggacaataatcccatcatgaagggcacccctatgacctcatctaatcagctcccaaaggccccagccacaaataccatcacatcgaaggttaggatttcagcatgtgaattgggtggggggcatggcagagggaaacatttaatccctaacagtggcaccacgttaacctccaggaaccaggagtctgtggtcccagggatcgtggagccccacccttagacacccccagggcttcctggaggaggcagaggacttattttgagttttctactcccagtgggaatctggcctgtctccagtttgccacatgaccttgccctctctgggactgtttcccacctgagaagtgaagggagttaaattaggacagtggtttttaaacttttgaggatcatgaccactttaagaatctaataagagcttttgacactttctctagaaaaaatacacaaaacttcacaacttttcactgtgttgggttggtgggtgggactctctggcccacccactttcagggctccatggactcgggggtaagaactctaaatgagttcatcttcgagaacattttcagccatgacatcttgtgtgaccatgggcatgatggcgtcctctctgggactggtcaccttatctacaaaataccaatgacaaaacccaccaaccccttaccaacccatcatcaccttatggatatcattttatttaccctcacaacatcaatgcaggatagacatgcttactcccattttaaagatggagaaggccgggtacgatggctcacacctgtaatcacagcactttgggaggccaaggcaggtggatcacctgacatcaggagttcgagaccagcctaaccaacatggtgaaaccctgtctctactaaaaatagaaaaattagtaggcgtggtggtgtgtgcctgtgatcccagctactcaggaggctgaggcaggagaattttttgaacccaggaggcggaggttgcagtgagccgagactgcatcattacactccagcccgggcgacaagaatgaaactccgtctgaaaaataaagtcggagaaaattagatgcagagaaatcatgagcataaagtcacactacaaaaaacctgacttcaaagtcagttgcctttccagtgtcccatgctgcctttgtgttaaaaacaagaacaatgacagcttctactactactatttatagaacactaggtgtgtcccagaccctgtgttaggggttttgcattctcctctcttttagtccctacaactccatgaggcaagcgcaattctccccgttttacagaggagaaaacggagacccagagtttcaaggtcccagagctaaaaagtaatagaaccagaacagcttcccgttttccgtgctgcgccgtgacccagacaatatctaaattttgtgccgtcctcagatttcagagtctaatccggctccagttcagggatggggcagtgacagattttataaaatgtctgaattccttttaaaatcatgctgttttattcaacttgggctcttacaataaatagctcaaaccaacagctgggaacgtatcgccaagctgcggccccatggggacacccttaatgaaaagagaacatttctgaagggcaggagcacattaattgtgggcatgcagatggagattgctgattatggatgggcccctctcgagtaggttaagtggggtgccccctttgcagctctccaccccaactcttgttgcaccattgatttgctgaccaaactcttgcttcagagaggagaggaggccattctagtcttcatcagtgacaaatctggcccagtggcatctgattcagagggctgtgggctccagctcctgcccgagagaaccgtcctgtaacaaggctgaggccggcccttgagggactgggagggggactgccccaggaccttttcatcctagaagggaggttgtcttgggccagaagtttccagttcaggagctccagctgggcagcctccaggtggactggggcagatgacccgctcacccagcactgctctgtcatccacacattcgactatgagacaaacactggtgagtgtgaactcagagcctgaaggggccctggacattcacagataagccacaccccaccctgccccccaggagctgaccgtccagtgaggcagctggccagatgcgtaaccatgaaccacaatgtgactggtgcagagatggggacttccaggggctttggacacagagaagggctcctgacccagcatgacatcttggaaggcttccgggagaccagacgtctctgcagagtccataggagttcactgggggaagagggtggggtagaggacaggcccggagacaagggggtcccagtggacccaagtggttctgggaggctgatgggcagagggaaggagagtgaagccaagctgcaagcccatcctgctcttagccattattccaggaagcattcaatcagtgtctactgtgcacgtagactgtgctgtttggcagtgaacgcagtttctgtcctgaatgagcttatctgctaaggtggggaagagagaaaataaattagtggacaaaccagcaattgcttaggttcagtatgtgattagagctttgaaggaaagcactagggacagtaagcagacttgggggcaacttcagacagcaaattcagagaaaagggagatttgacgcccaagggatgaggaggggtgagccctgggcagggttgcaaggggctggccggggaggggaatggggggtgaagagctcagtgcctccaggaaacggcccccaggaccccaagccccatgtgcgttgggggaggggaagtcagccagggccagtgcaggtgacccttgtggaccattcaaaggacttgcgattttactcctgcaaagagaagccacagagtgttgagcaggggagtgcacggtcacactgacattttaaaaggaccccctggtggtcctgggggatgcggaatagaagggaagcaaaggcaggaaacggggagcagccggggaaagtggcagaaacccacaccagagacgcctgcagcttagagctgggaaaggagagaagtggacagaggatgcactgaccagagtgaccgacagacaaggacgggctatcagcttgggagctgggtgacagagaagggcccctgggtgacggtgacagtgacagtgaaggggaacaactgagccattaagtatgacacgtctgtgacagccaggcagcgttaagaggacagctagaggctgagagaggaaagaggagctcagaaaagagctcagagcttagctgctcagaagagagtggagaatttgggagccctccctcacgggtgccttccagagccctggagatgggtaatacagagacaggagtgcctggagaaagaggggaaggggttaggagggaagaggagcccattgtatggcagcatgtaccccagcagggtggtcacgggatgctgaatgcatatccgggcatgaaggcaggaaggacagggaggacccacccaggaccctcagcaggagggtggcatgacaagctgtctctggctgctgccccaggagcagggtggagtggctttgcaagcccaccactttccctttcacatactgatggcttcgtggccccctgcacctcccacttagaccagcgctctcccacctgtcagacctggggcattttgcaaagtcccttgcaggtgggatgcggtgatcctcgttccttctgcaaggctgccactgtgtggcgagcagcggaatgacagccaggcacagtcacacattcaccggcttgaaaattcaagcacttgcgcacctgctgtatacgtggtacaggggtcatttctatgtggggcacaaggaaatctgagacctggcagtgcagtggtaagagagagggtttgtaatcagtcaaacatggactttaattctgactccaagatgagccactgtgtggctctaggcaaagttggagcatcccatctgcagagcgaggacggcagctttgccttcttcgcgcatgattaggacctgcctggcacacctgagtggacacccaacatccctgaagcaggaaaacagaccgcagagcactggggagggatgcgccgatcaggtgggccaagcccaggctttgtgggtctcggggatgctgtggaggcccccagggaaatgaggggggcttaggtggaggggcggggtccccagaggtgctgcctcctgccacacgtggcccttctgctccccgcccctgcgccttctcaccctcgctgcgtctgagtgtgggattctctcttcctgttcccttccgtttgtttctctgttgatccctttctgttcttgagtctcggtctttctctctctctctctctctctctgcctcttcctctttgttcttctctatctccctctgctcctttctctcagtgtctctctctctccttctctgtctctttctctctttgttctctctttctgtgtccctttctctctctctgtctccctcctccatccacctctttcaccatctctgccctttctgtctcattttttcccttttttcctcttgatctctcggctccatccctgtccatgtctgtctctgtggctctcttggtcctcccccaaccccattgcttttcctctctctgcatctccacccatttctgcccgtccgtctgtttctgccgcctttccccacccatccactctctggctatgtctcctccccagcctgtccaaagctgccgagctggaccatcactgggtggccaaggcctggctgaatgacattggcctgtcccagtactcccaggcctttcagaaccacctggttgatgggcggatgctgaattccctgatgaagcgagacctggagaagcacctgaacgtgtccaagaagttccaccaggtcagcatcctgctggggatcgagctgctgtaccaagtgaacttcagcagggaggtgaggaccagggcacagggtgggggcaccttccactgcccacccctcccctcttggcatctactgtctgttcatctgtccacccactacccgtctatccatctgtccacccatccatccatcatccagccatccatttattgatcatccgtccatccatctacctacctatccagccatcatccagccagccagccagtcagccagccatcttctcttcctccttctttccaacaaccccctattgggcacgggccaggcgctgtgctcagtgcaggggaaatgggagccctcatccttggagagctaagtgcttaccagagagaaccacaaggaagctggtggtgccaatattgtgggagattgtcccagtgagggaagcccagggttttatgaatacccagagaagatatacctactatgtatacccacaaaaattaaaataaaaatttttaagtgtttgctattttaaaaaaaaagaaaaaaagaaaacccagagaagtcttcagggggctcagggatggctcctcagagatagcaacgactaaattgagacccgaaggaggaaccccagggatcagtagaagacatgagagaaaaagtaacccagcagaggcaacagtgtggtgaaggcccagaggactgatccacggcagcagagttgctgagagtcctgttgggtggggtgctggctttgaggtgggaggtggtggggggttgctgcagaggtcaccaggggcctgagctgctgggcactgtggggctgagtccaggtagctgacttttcttagagtgatgtcagaacccaacaattcagggtcagaagagggacagaagagggggccatccagccttttgtcccccttctcaaccacccactgaaaagcatccactgtgtgcctactgtgaaccctggggtcagtccctgtgggacccagggaggcctgcgatacggtggcgagatggtgagagaggacctggaatcagccaaacatgggttttcattccaactccaagacgtgccactgtgtggctctgggcagtcagagctccctgttagtggagcgaggacagcagcagtgccttccccatgccacgccgaggacagggagtgacaaggacacagaccctggccccagtccccagtctgccaaggaggcacgtgtgggagatcacagcagttacatgtaaaaagaggtgcaggggccaggcctggtggctcacgcctgtaatcccagcactctgggaggccagggtgggtggatcacaaacaaggtcaggagttcgagaccagcctggccaacatggtgaaaccccatctctactaaaaatacaaaaagaaagcagcccggtgtggtggcaggtgcctgtaatcccagctgctcgggaagctgaggcaggagaattgcttgaacctgggaggcggaggttgcagtgagcacagatagcaccactgcactcatgcctgggcagcagagagagactctgtctcggggggaaaaagagatgcggggcacccccactccacacgtggcctctgcgtgtccccttgtccctccgaatgacccactgtctccccacaaggccctccaggagcgccgggcccgctgcgagacgcagaacattgaccccgtggtgtggaccaaccagcgggtgctcaagtgggttcgagacatcgacctgaaggtgagggtgatagcggaggtcggggtgactctcgggcatacacaaaccccatgcaaatctatatgcaaatcaatatgcaaatcacatgcaaatcaatatgcagatctcatgcaaatcaatgggcaaatcccacacaaattaatatcccctttgtgtgggctggagcatcttaactcaggcccagcaagaattacctgcctcctgttattcaggaggagggaactgcttaccttccaaataggagccccatgtcatgatgctttgctcacatggggtagagaggctgagccagccccactctcctaagcaagtgtggggttgagattcatttaacaaatattgatgatttcctgctagggtcagggaccatctcagtaacaggaggtccctgacctcgtggctctaaaaaattggggaggggttcctcttcaccgtcaaattaactggtccccagggggtcaagcccttgctgttggggacagagccccacgtggaactggggcccccttaggccagcagcatggcccctgcaggctaacaagtcccctgcctttgcccccaggagtacgcagacaacctgaccaacagcggcgtccatggtgctgtgctggtgctggagcccacattcaatgccgaggccatggccactgccctgggcatccccagtgggaagcacatcctccggagacacctggcagaggagatgagcgccgtcttccacccagccaagtgagcacgggctgggatccagtcatgtgggctgctgggtacagtacagctcagggctttggaagcagatggtccagctccccatcctggcccatcacttactgcctcccactcgttctttgcaccatggtggtcaccttttacagatcaggaaactaaggctcagagaagcaaagtgctttagcctgaaggtcatagactagaaagacgtagaggagcagtcaggtcttgaattaagtgtatattagatcaaaaaacacccaggtgtttagagaagagatagcaagcagtgcatgtgtaaggaaaggccacgtgcaggtggagtgtagctgggaggacttgcattggcctaataggttgagttggttggtccaggtggggcaactgtggggacaaaggcttggagtcaggaatgagcatattaatgatgcttatggaccaggtaagcagaccacatcagcccacctatcctagtatccccatctgaaaagtgaccagagaatgaacacctgggcataaaccagtccccctcccagtggattctcttcttaaaatcatgcacttagggttagatgaccatttattgaatacttcctgtgtgaactatctaatttcatcctcctggcaatgtcaagagatcagtagcactatccctcctttatagatggagaaacttcttcaaaggtaccaagctatgtgcccaagatacacagctagtaagtggcaaatcctagatttgtcctttattctatcaatatggtgtattatattgattgattgaatttcatatgtcaaaccaaccttgcattcccaggataaatctcacttggtcacagtgtataatcctttttatatattgctggattaaatttgttagtactttgttgaaaaaatctgcatctatatttataagggatattggtctatagttttccctccttgtgatgtttttgtctgattttggtatcagggtaatatagccctcatagcatgaattgggaagtattctctcctcttctgggttttggaaaagcttggaaggattggtgtttgttattctttagacatttggtagaattcaccagcgaagccatctggtcttaggcttttctttctgggaagctttttgacttctaattcaatctcttcacttgttagaggtctgttcagattttctatttcttcttgaggcagtttcagtagcttatatctttctaggaatttgtccatttcatctaggttagctaatctggtggcatgcagttgatcatataatttttatcttatagtgcctcttatatataaagttggtagtcatattctctcactcattcacttactcctggttttagtgatctgagtttgagttttgtttttttttttaatcagcctatctaaaggtttgttggttttgttgacagagcccagatttgaccttggggctctctaactcaggcctgagtcctaaacccctaaaccacatggatccttagggagcagctgggccactccccatgttatacaggtggggaaactgaggcttaaggaaaaattgtgcatgtatggcagggtccaggtgtcctgggctgctcttccctattggaggctgacacccaagctgttctcaaagtgaggcccaccccacagacccttgcagcagaatcattgaagctattgtaaaatgcagattccctggtcctgcctcagacttgcaggacaagtatctgctggcagagcacaggactctacatttttagcattttggggtgcttcttacagagacaatgtttgataagaactctgttttaggccaggcatggtggctcatgcctgcaatctcagcactttaggaggcggaggcaggaggattgcttgagtccaggagttcaagatcagcctgggcaacatagcgtgaccttttctctactaaaaattaaaaaaattccctggaggtggtggagtgcaccatataatcccagctactcaggaggctgaggctggggattacttgagcccgggagtgtgaggctgcagtgagctatgattatgccactgtactccagcctgggtaacagagcaagggtccatctctacaaaacagaaaaacaaaacaaaaccctcctccaggagccatgaatcaaaagacacaggaaaaagccttttctcctcagaattatcccctttccctgacttcccttctggagccacatgatctgtaacaaacttttttctgagccctggagagatggctctagctgaatattagcaggcatttgtgtatctgattaaactcttgaccactcatgaggtgacaggtgtgttcaggactaagactagtcagggagcaccagagaagggactggtggggacaaatagggtgggttcttatgttgtggtggggcagggacttcttcaagaatgagacgaaatcaatgaacctctcaatgataagataagagggaaatgactctgtccaggctccacattcaccaagagcttatgggtcccaatatgacgtcatctctagtctcttcccacaactttgacaatgcacatgacccaaaggcgccaaggagaagtctctgccatggtctcatggtatctgctttgacacacactgacttcctgcatctcccgataaaccttggtccggcgccaacaatgtgtcagtcataggactgttctttaaggacctggagaataaaaccagtgggcaggaaggatgcagcaaggagcagaggtacccaaaggcagctgccaggggatcggaggagtcaaaacaaacaaaaaaaatatgccttgaaggcaatatggcctgtcactaaaacagagtcagggacaggacacacaaaggagcaggactggaaccagagcaggactggaacccaggtctctactcctagtcagaagctctttctggaactgatctctctcccctgggatctaagctagaatagtgccccttttgccataaaagccaccctccacagtcattgaacacctgctgtgagcaggcacttgggtgatccatgtcctgccttcacgaagcttacagagatgggagaagacctcataggtggatggtgtggagttccagcccagggcctgcttccactccaggttttctctctttcccttttttaatagatctctgagggtctctgctcatccaagaaaggctttggctcccatccaggcaagaaactggtttcatagacaactaggtgaagacataaacccatccagaatgccttgtggcactctagccccaggcaacccaagttcaaatcccagcagcaccaatcctggctgtgtgaccctgggcaagttacttaacctctctgaactgtactttcctcatttgtaaaatgagtatggtaatcactatctgccacccaaagagttgatggcaagatgagataagacaatgcataaagcaattggcaaaggaaccagtacatcataagacacccaataatataaatattagtgatttattccaaacccacccctagccccaccaccgctgcctcccattcctcctctgcagggcaatggctgcaatgtggtttcgagccccagcatcactgctttcttgctgtgttgaacatgagctagtggttttaggttttactctctgagcctcagtttcttcctctgtaataggggaatatgactcataccgaccttgtagctttgttccaaaggttcagtgaggcaaattgtatgcagcctgcttgatacatagatgcccggcagtaactgagagcttctgcccctgccttcatctggaggcagaagaatctccatgcagtcaatttcctctggagtagctgcataggagtccccttctgtcagtttgctccagcgttctcattagcatttcaatggagaagaacaattccattacaaactcaaatagacttgaccctcaaacacatagaatgagagaaccttgtcacctgtcccacctcctcggctgacaggcttcccaagacattggcaatggaaaacatttattctctggtcactcagcaggccgctggaatgggggtggaaggacacattgagcttagatgagattctgtcccaccccaccctcaaaccatccctgaaatgtgagcccaaactccaggcactgggtcagctgagtgcccagaggcgtgggcctgtgtgcaatgggacccagcggggcctttgaggccacattctggctcctccgccatcatcgtgtgattttagacaagaaatttaccctctctgagccacggttttttcagcttgcaatggggatgatcactccttcttcccagggctttgcagagggtttgctgagccaccgtggtgaggagctgacagtgtgcccagcacgtagtgggtggccctcgagtactctttccttcccattcattttctccagcacagcatcttgtgcctctctgcccttgtaaatccttggttaatgggttgagactcaatgctcgggctggcccacctggtggaggctgactcccaacccccaaccttccttcctgcaccatgatgcctatttagtgcccagggttctctacattgactcaggagagtccagtgagatgccccattctccataacgttccctcatcaaaagttccccttctaacgtaccatttcctcgaggtctaagtgactagaaatacttaataggtcggttcaaagcttccaaagaccttggccctgtgcttggcttatgccctggagttttcgtgttttcatcttatccaaaggcctagatggggggatttcagccactgtggaaaaaataaggagggaggatattttggcacactggaggccaaggtcaccccgtattcctttgtctacagaaagacaaccactttctgtgcatagggtagcttgttaagaccagggctggccaggcacggtggctcacacttgtaatcacaccactttgggaggtcgaggccggtagatcacttgagcccaggagctggagactagcctgggcaacatggcaaaacccggtctctaccaaaaatacgaaaattagctgggtgtggtggcgtgcacctgtagtcccaactgcttgtgaggctgaggtgggaggatcacctgagcccagtaagccaagattgcaccactgcactccagcctgggcaacagagcgagaccctcgctcagaggaaaaaaaagatcagggctgcttactggactttatcgtacagatgaggaaactgaggcccagtaaggtgttttactcgcaccagaacatatggagggaatagctgagcaggaactccaaccacgtctgtgtccccaaagcctttggccacagtaagatgtaattgtagcaattactctttctattgttactcagagcttaatgtttatgtgtgtgtatatgtatgggtatgtatgggtatgtgtgtgtgtgtgtatatatgtgtatgtgtgtttgtatgtttgtgtatgtgtttatatgtgtgtatatgggtgtatgtgtatgtttgtgtatgagcgtgtttgtgtgtatatatctgtgtgtatgtgtgtttgtgtttgtatgtttgtgtctgtatgtctgtgtatatatgtgtttgtgtgtatgtgtatgtgtgtgttgtatgtgtatgtatgtgtatgtggtgtttgtgtatgtttatgtgcgtgtatatatgtgtgtatgtgcatgtgtgtgcttgtgtgtatatgtgtttgtgtatgtttgtgtatgggtgtgtgtgtgtgtgtgtttgtgtatgtgtttgtatatgtgtgtttgtatgtttgtatgtttatgtgggtatatgtgtgttgtgtatgtatgtgtagatggtgtttgtgtatgtgtgtatatatatatgtgcgtgtgtgtgcctgtgtgtgtatgtgtgtatatgtatgtgtgtatgtgcgtatttgtgtgtgtatttgtgtatgtgtctgtgtatttgtgtatgtgtgtgcatatgtgtttgtgtgtgtatatgtgtgttgtgtatgtgtgtatgtttaggtggtgtttgtgtgtgtttgtgtatgtgtatatatgtatatgtgtatgtgcacttgtgtgtgtatatgtgtgtatgtttgtgtgtgtgtatatgtatgtgtgtatttgtgtatttgtgtgtgggcatattgtatatgtgtgtatgtttgtgtgtatgtgtgtatatgtagtgtgtatttgtgtgtttgtgtgtgtctgtgtatttgtgtgtgcgcatatgtgttcatgtgtatttgtgtatgtgtgtatttgtgtgtgtttgtatgtttgtgtatttgtgtgtgtatgtatgtgtgtgtatttgtgtgtttgtgtgtatgtgtttgtgtgtgtgcatatgtgtttgtgtgtgtgtgtgtgtgtatcctctcatttagtcctcacaatgacctgccgaggaagttctgttattaaccccactctgctcagcacgcggcccaggccatgccaacgctaaggcactgagccaggctgctgacgtggagcccacacgtgcgaccactgtcctaccctaaatcccaaagtgggaaggccgtggtctagaccttgatcccagaggcccaagttcaatttccatccctgccactgggtgtcttgtgtatctttggacaagacacaccccctctttggtcttctgtctcttcagtgaaaataagagatgggaccctgaggctctcccaggcttatttgactgctagtgttccaagagctgggggatccagcacccctctgtgccagagagcaaacagccagctacctgagtttacattttttggcttctgcaattacagctgcttccccactggacctggggaatttcgcctccaggtggagcagaggggccattcatgagggcatttcctgacccaccactgagcaaggccctccctgttatgtggaagcctgtggaacccaagagtttgagaacgtagctcatttgccattcaatcagtgctgtctcctacacaccactcccctcccttgaactttctcagcaaaatttgccccagaagaagaacttctctgaggcagcttaaaagatgctagaaggttctgttgttgttgtttgttgttgttgttgttgttgttgttttaaacagagtcttgtgctggagtgcagtggtacgatctcggctcactgcaacctccacctcccaggttcaagtgattctcctgaggttcaatcttagcctccgagtaactgggattacaggtgtgcaccaccatgcccagctaattctttttgtaattttagtagagatgggttttgccatgttggtcaggctggtctcgaactcctggcctcaagtgatccacacgccttggcctcccacagtgctgggattacaggcatgagccaccatgcccggcctagaagtttcatttctttcaatgagtctacctccgtggtgacttctggctccaggccgggcctcttgccccaaatctgtttatccacagcattgatatgcagactttttctgtataaggccagatagtgaatatgttacgatctgggagccatatgatctctgtcaaaagtctacaactctgtccttatagcaacaagacagcagccatagacaacacataagcaaatgggcactgctgagttccaataaaactttatttataaaatcagtcggccagctggatttgacctgcaggcaggctgtagttggccaaatcctaacagaagcttccatgcttttgcacaaagaagggagtcatgggggcagcttcaggcagaaagccaggtgggggacacagattgcaaattcagagcaggggagactcctcatgcttctccaagcacaactaattagctaccatgctgagattctcatctggagtctgttgcagtaaggttcacagtacactgaagagttaagatcaagactttggagtgtcagaagcctgagttcagatcttgattctgccgctaacagctgtgtcgtcttgggcaaattgcttgctgtctctggcctcctttccctgtaatgctgggctggcagtcccaagccccaggcatgttgtgagaatcacgcttataaagtgctgagcacaaggatggcacgtgggaggtaatcagtcggtctcagcagctgtggtcattgtcaccaatgtgtgtgtgtgtgtgtgtgtgtgtgtgtgtgtgtgtgtgtgtgtctggggagctgactgagcctcccctgctgactcaaaatggtcctctcttcagctccacaggcatccgggaggctgagcgttttggaacgccccctggcagggcctccagcgtcacgcgggcaggaaaggaggagaacagcagcggtctcaagtacaaggctggccgggtaagtctctcaatggatttacctgtgagtcctgcagacccgggaaaggtctttttttctcctcccgggagctctgtggctcctgtgctggcctgtgaaggtggagtgccaggccgggtcacgggggcatccaggacagatgccctggatgtaccttcaaggaaccttcacgatgctttgggtacagtgcacaaagcccccgcagggcttcgagtagcacctggatctcaaagtgcaggtctcacctgcctgcatgagaatcacctggggctattactgaacttgcagattctgggacccaccttggtctcctggaaaaggagttctctggggcgagggggatcctgcattcagctaggctgcccagagggttccggcgcagccccaaactctgagccccaatcactgatttcaatttgcgacttcagtgacctgaccaatagcaaagatgaaccctctggtgactccaaccaaacagtatgaaaacatgtgcagttcaggtctgattgcacagactccaactgacacagattcctcaatggaaatgcacagacagagacggcagaactgggtaatccaaaatgtcttccatttgaagaaggcatgatccccattcattcataaacatgaatacattgccactttacccttaagaagctccattctagaacgtgcattctagtaattggggctgatattgccccccaaaggagtgaaaatttgttttggcgctggtggggggtgggggcggtggcaaaaattcttattctttctatgtaaaagcacaaatgtacatatggtacggaagcagaggcgtagtatgtctgtggcattacaatttcacagcaggggtgcaattaggaaaaaactgtctaaaaagtctccttagggagcaataataataataaaaaaagaagatctggaaacactggtctggaaagaaaggcagtcaaataaatagttacaaagcactaatgtgactactttaacacagagatgtgtgcagtaagagagaagtatttttgaaggcctactatgtgtgataataatagtcactattcatcaagtacatcaaggacttactcggtgcaagcacttgctatgtgctttgcagatgggacttgacttttttttttttgagacagggtctctgtcaggctggagtgcagttgcacgatctcagctcactgcaacctctgattcctgggttcaagtgattctcatgcctcggcctcctgagtagcagggactacaggagctcgccaccacgcccggctaatttttgtatttttaggagaggcggggtttcaccatgttggccagactggtgggactttactttttacaacaaacctgggagttagaaactactattcccattttgtagctgagaaaaatgggctcagagaggggaagtgacttgtccaaggtcacacagctgggaagtggcagagcagggatctgaacctgggtctgtgagtctccaaaactcgcattctttctgccacaccaggccgtctagaatattcctccttgacttgggagtgcagtcagacctcatgggcctgctcagacattctcacaggtagtctccaggacacacttcctcaactctccacccaccaaggagggaagaaggaggcttttgtgaatcaggaataatcagactaacgatatttgtcctcacccttggtaaccaactgaatccttccgggggcagggggacacaaagctctcccctaatggtcattcacaaactcccctcaacctccctgagcagggagtattattactaataggaggagcacacagaggttaagtaagttactcaatcacagagcaattagaattggagacatttcccagaccttcattcttaattcttgtttctcttcttcctgtcctttgatcatattcttctcttctcagctgcccctggggaagataggaaggggcttcagcagcaaagatcccgatttccatgatgactatggctctcttcaaaacgaagattgcggagacgatgacccccagagcaggctggaacagtgccgtctggaaggctacaacagcctggaggtcaccaacgtgtaaggaactggtggctccaccagacccaacgtgagagacccaggaaggaagagaagccagatggccccaggtgtcgttctcactgtacatagcggccgcaggctgaggatgtcccttgctcctgggcaaaatcccgatggactctgcggtttcagctccacagcgcccaggagagagaagacaccagcccacctgtcttgggtgggccatggactttcctgttcagctggagatgggcccagaggacctgtcacagtgtccggccctgcctccatccaggatacacaggctccacctcagagtgaccgtcactgtggagcagccaagcagtccctggagccttaaacggagctgccaaggtgggaggaggcccacagttccctaaaacacccttccggcgggagcaggggggaccccaaccccacaccccagcgcccagtgcattggcagagccgggtgcaggaagtgctgcctcttgccgagacgtcggacagggcgggggttggggaactctcggctacagcatcttacccttgactgagaacttgggtcctgacttggctcactgaatctctcttgggagaatgcaaaatccttccacctgaaaagctctgtgacacatgggggtggacgtattgaagagctgtttgccgatccacccaggagtggctacgctgagtggggagccggtgaatgatccgtgcaggagtggggcttagcagccacatttctaggagatgcagatatcctatcaccagaatgaaagctattgggacaacaggatcggggatgaccgacggccccatatggtgaatctctggcctgtggtttggctttactgagattccaaaccccactatctgcactccgtgacagtggtatggagtgtggcaatgagtttggggtctggggcagggaaatgcttgacattgttaacccaacaaacctttgttgtgatgtccctgtcacctgaaacataggtgacatagctcaccaatgtcctaaccgagacacaaactccacagagcaaaatcatttggtattggtggggagaaccccagcccttttcttgacctgccactgttatgctgtgtggcttcttcccagtggcctcacctctctgtgcctcgatgtcttcatctacgatacttctggttccctcccagggacatcgtgaggattaacacttgctaatatctgtaacacaatttgtaacctctcaggagacaatgggaagttatggggtagctaatttcccatttacaacacagaaatgatatagagctagttcgctccaactctttaggttgaagcagtgtgcaaaaggaagaaaagaaatgtttaatgttcagacctgccaagagcctccaacagggctcaagaaacatataaatcccatgagcacagccttgaaaaccagtttgactcaagccttcgggcctcagttcattgaccagatgacagccacgtgatgattagggaaggacggatgcattgcgattctgcttacacatcgggttatcaaagcgagtcacttgttggaaccatgatgctcgacctccttcaaggccgtttgcactggggcttgagtttccaagattcacaacaggtgtcagcctctgagaaccctcaaagcgtgtgttcttcaacctggcaaattgtttcctctcatgggggaagccgagctctgatgaacttgagaattacacctctctcatgccgaagaccgtggtgttccccctaatgacataaacgcagcctttcttgctgtctgagaccaaatgtctagttggtagacaggtggatgtttggcctcctaagggcacacttctgatcctgggccccaggtggtgaatctctggcatgtggcttggctttgttgagactccaaattccattatcttcatgacattcggcctcatccatagggtcctgaagctgcagtccacagctcagaaaggagaggtgagacctccctccaacctggtgccacaggtctctcccaagccacatccagcctggatgacctgggaccccagaaactgccgtttgggaggcagcaacagcaacgtgcccaggcaggcagttattcccacagagtgagccagaattgtagcagggcacttgaatgcagagctgatgatttgaaaccaacgttcacccaacttgtcagaaatggcacttacatggttcgatcttgctggagacaagtggacaattgggggtcactggcagagacagtattgcccaaaatgttcacagcaggaggccagcaggcctgaggcaacacgggcaaccgcgaatgcctcttttggtttaaattatgccatcacaaccctctttcacccatgaggctccccatccctgacagccaggtgagcatttggagctggtttctcaacatgaggatgggttggttgttaaattaacaacctccacagtatcagattgagtgagctttgtctgctggaaaaacctgaaacgtcaactctgcttcaaggtcggcaagaagaacagaaggcggagacttggcagagagactcaagctgattgtcacaggctacagaggggccagctccagaacagtgaccagctacatcctgtccaagcagcccgagtgtggtcttggtccctgcagggcaatgtgggcatctggacctggggacgatgtggatgcacttcttggaaagctgttgtagcttgtgcctgtgggtggagaaggcacctgcctggtagactctcagctttctgacccccaggagcctctgcgaggcccctttgtccttggctgagccggacctttcttttggaaatctgtctgtctgttggcatcgctgttttcagaccccaggctgcagaggaggggagaagccacacaacaatctggacccaataaagtggagagaagggcgtctctacacagcccggccagcgtggagggccccaggacagggacccaaaagcttgacgtcactgaacagggctgggtactggcagaacaggaagatttggccagaggtgacctcagtgttccctccaggggcatccaggcccctctgacctggggagaagaaggcccatgctcaggcccacctccctcttcccatcagagcccatgcgtcctgggcaccaccacttccactctgcttttcgaggctccggagggctcttcctgctgtgaaaggaaaggagaagaaagcctgtgggcaatggcaacctctgagtctggcattcttgccaatggctggccagcgaggagaatctcccgagccctgacacacaaaggcattttgtggctgcagaggaaatgggttggctctgaacaaagatgcagtttctagggccgtggccccaaatcgcttccccgagagtgaattttaacactgtaacaataaatactactgcacagcactttatggcagagggggcttttttctgtgttttctcatttagtgttcccagcagcctctttgtgagattttgaacccatttcacagatggagaagctgagatcagaaaggtggagggccttgcccagctctgtaaagctaagacatcccagggcagggactcaaacccagtccatctgcctccaaatcccaggatcatcctcacaattacacactctcccaaccctcacccccctgcaatgttggcaaacccccctccccccacctcccagcataggatttaccttagcaggcagcatcactcaaaatgcaattcaggtgcactcggagtgtctggaaaagtccctgtgggggcattgccttctgccctgggaacttgcagtcaggagtggacacctgacaagtcccctccccttgtgtcatttgtgtcactccgtcactcctcctgggggcacttacatcttcagattaccggactggatttctagtggtgggacgccccagcacagtgcccttcagaccgccccatggcctcggatcacctggtggggaggtattttgggagtgcaggtgcagatgcgggaattctggagtcccacctgagatcagcatttccaacaagcttccaggtgctgctgccggtccagggatctcacatcgagttccaaggtcatggcgcacagatgggccttcctagcaaagccctaaccacacaaggtgggggctggtctgtgggctccacccaggtatccaaacagccctgatggagccccacctaccaaaccaggctgtgtgcttctcatggggcaggaacccagctggacgcgctgcccattgctcatgtcggcaggggctgagcactctggaagtgtgtattaaatggggaggagacaagaaaagttagaagacgctgaaagatagactggggatggccagtttctctaggctgaccacagatactgtattgttcaatccacctgggagccagggctggtccttggtggtggggatccagtggcagaacttacacaggtcatgaaaggaggtaagaaacacaccagtggccagggtgattgatttcagatagtgacaagtgtgatcgggacttcaagtagagtgcgggggatccttgaggatttttgagctgagacctaaattctgaggagccagccctgcaaagatctgggggaagaccatcccaggcaggcaggcagtccctgagctagatgctgggacgtaatggtgaaaaaatcctgcccaaccactaccctcttggtgggaaagacagacatgaattaaatactccgccaagtgtcactgtggtctgtcttttttttttttctttttttttttgagatgaagtcttgctctgtcacccaagctggagtgcagtggcaggatcatagctcactgcagcctcaatctgctgggctcgagcaatcctcccacctcagcctcccgagtggctgggactacggtcatgtcaccacacctgattaatttttt

SEQ ID NO: 293 - DNA, 111895 bp, Homo sapiens
  source 1..111895: mol_type = genomic DNA
cctctttaacttcaggacagattcgcagcctccccacctgtttccaacctccaaaatgagagctgtgaaatctccttgagatctctgcttctgctgatctattcagcaactatttcccgagcacttgtgttccagtgcataagaaggctgtcaaatgtgctgtcttcaagcatctagaaagccagtgggggagaaagacaagaaagtgactgtgagcagcaacaggcccccgggagggtgcagaggtgagcagggctgaaggaagatgcagggggtgggaggcgctgtcagggtccgggaagcctccttcccggaatggaaaatgtgtaatgcctgagacccagatgccttggggagcttttggggaagcagaggtctgattaagcactgcctggaattccctcattcatgagcattctttcagcacctaccctgcgcccgggagaaacggtcttgaacacagcagacaagctcgctacccccatagaatgtaaagaaacggggcacaaattagcatacaaaaagacacaagtgtgacctacggaaactgcacagaggaggtgcaacgaacggagccctgggttaggaccgggaggcgctgcccaccatcaacagaaatactcctccttttgccaactacacacgcgagaggctggatttccttcacagacgtccaccaaagccacacatcgcgacacacggaggcagaaagcagcggtctcctaagaagttagacacgaggaatctcgggcagcgaggtgcctgcaagcccgggggcgggcgggagcagcctgcacgcgtggggaagggcacgcgggagcgggtggcgccttccgggccgggtcggccgggaggttccaaggcaggaaaggggcgcagaaggccgggacggcgccgggtacaaagcctcgcagggacgcccgaaggccgcagagccaccgcggggaactgacagccggagccggagctggagccggggggcggggaggaggggcggaggggcgcggccaggcggggtccgcggactccggcctgggaaggatgcgcgcggactagggcgcggggagccaaggcccagaacatcggtaccgcgctcccttcagccgaggggctgcagagaggccagggggcagggggcagggggcagggggcagggggcaaagggcaagggcagaaaggaacccacgtagccaaacggcacccagcggccccgaccccaagtgtcccgacgaggggggacgcctgcgactaacgcggggacagcccccgccgcgcgccaccgccgcaccccaggcaccgggcccccacgcagggacggcgtggaccaccctacccccgaaccccgaggctctggccaacactgaggccccctgtgcctcgaggccgcgtccaacctcccccgcggcgccggcccacatggttccgcccgccgcgggccgcgttacctaggagaccgacccgccgcggccgcgccggaggccacggagcccacgcttttcagagagtctccactcgacggacccagaggcccggcggccggtgctcaacggagccacaagcctgaggaccgaggactggccgaggggcgcgccccgtccgctgccacccgcgggaggagcctcggaaggcggcgcaccgcgccgcacactcagtccaagaacccgcctcgcgtcactgtcgccgtcagggccgcggagccaatcagagcccaagtcgagggctgcgctttgcgagcgccagccaatcggtgcggcggcgggcccatcctgatttgcatgtccgacgacccctcaaccaatggtaatgtgactggcgtgaacaatagccaatcagaagctggaagaggcgtggccccgggcgtcccacgaggtgaagatgctgctggcggaacctgcaggagctagcgggattcgggggcgctaaagtcgcaggggcagggcgggaaggaagatccggcgcggggcacaggatccggagctggagcccccaggtgagtaccggggagaccccggcggggcgcgctttccaccaagctgctccgggacggcggcggcgggtatccgcgaggcccgcgctgcggcaggcgccgcggtcccgtctccatctcttcttccccggccctgcgtccctgcctccgccgctgtctcacctcctctccagcctcctcacctccttctccatcgtctcccttcccccatccctttctgtctttccttccctgtcctcccgcccgcccgacccttcagctcgcatccctgacccctgcccctgccgccgtccctcttcccggtgcacctcttccccatctctgcccgctccggtcctagcagcctcgccctcccctttcctccatcctcctctcatcccctctcccggcctctgcgcagccccaccggggcgctgctgttcccggtcctccccatctctcctcctgatcgcttctcaaggctcatccgtcgttctcgctgcctgtccctgtgtcgctccggtccctttccccaccctcccattctgcccccagcccctccgacctctccccgcgggcacgctctcaccaccttaccctgctccccaagactgtgaccctgcttcctgcaccagttcctcgggctgtttacagcacacacaccgccacttctgaccctgagcccctactcctatcttaagcttctccctcctgccaggccttggcacaaagcacttccgcacctccctacctgctgctgctcccaggatgcaaagaccccactgctgcaccgcgtcctgcggcattagcagcagccggggtacctgcccaccttcccaccccgccaaccagccgcatcctggtgtccctcctcctggcatttgtcctgggggctcttacagggactgtgctttgcccgcagcatcccggggtgctccaggtggaaagccccttagcacctttcctccctggccaccgtctccttccctccccacccccactttcctgctcagcctcactttgtgattcagcatttttggggttggtaactttcttgcttcctgtcgtgatagggacctggctacggagctgaaggcaggggtcttgaccctgcggttagcagggccaccttaggaaccagacctgagctgcctggttgggagggggctgaggagctggggaccgccactgggggttgtcttttcctccctttcatttgtctgccctgtgttgaactgtgtccaaggggagatgacataagtaatagctcttggggaagtgggctattagcatttatggaaattaatacatccacatccgaggagcaagaacaccaagttcaggccacagctgtcccactgtctgtcgtttcaggattttttctttctctgcaacttctcctccccgacaaaaaccccagcctcacccctcccctttcccccagtgccaagagtaagctcctgctctgctaaggaagccgcattcaggccccgcgttgcaggttgcagggtttggggacctacgtgtggagagtcacatctgcccacctgattctcgcctggcggccgtgtctgctgcagagccctgtgcagctcctggccctgtgctctcgcagtgtggggccctaagagtgcacttggtcctccaggtcctgtcattgtctccacggccacactcggcctcagtggcactgacagtgttcgggccgcagcacatccctcgagagcagcatggtaggggcttccctgttgacacccagggccattttttttttccctgcgccagtcagcaaatgctttgtaggtgctagtcaacacctgggggctgagccaggcactggagttggggggtgtcgtgaaaaagtgtgaaacccttttcgtgtgtttcttggttgagaaccgtcttgggtctggatttggagcctggatgggaagcagtgtgcacagaagccattgcacccgggaggtgggacgtgggccatggcgctagagagctggaaaggccgagggtgccatgggctggccagctagagaaggcttcctcgctttcatttttcagtcatcttctaagacccaaatggttcaggaggaagcgagtgccacacagttttgatttggcagtttccggcctgggcttggagggaggggcctcccctagaccttcctgtgtgttggtgctctgccgtggtaactgggaacacatcatctgtgtggaaggagagcctgctccctcgcgagaaccaggggaccgtgcttctgtttccagggactctggccaggtgcggtatgtgtctggtcctcggctaagttctcagtgatattcacgccgccagaggtcccagagtgaatgttttcctggcgtccctgaataaggaggcaggacagtgggcagctcggggcggcaattcgagaaggattgatgccagaggtgtctagggccatagaccccatgttcccgccagtccccctcccaccaccaggaggacttgggtcttggcacccagcagccggtcatccttgctctcagaggactaaacggaaggacaggcttctccagggtcaacagaggcagtgacggagctgggttggaccccctacttcctacttatttgagcccagttcatgccttggctgtccgagctgggggaagccagcaccccgaggacatgaccggctgtcccttcagaaggccacttggaggcattgctgacattcatgggcgcagccagtgcccttgggtgtgtccaggtcactggaggggcttttgggactgggaggtgccactaccatggagatttctcagcgactcagtcctgcctggcatgcaggccctggtgcaagggtactgttgttcgtggccttcaaagagatggccccatagttagagaagagtgagggcaccaggtccgtggtgggatgaaggaaaggagggaccctccccacactggaactacactcatgacctcagttcgcctccggcacttgtaaacaaccctgtgagggaggctggatagggaaactgaggcacagagcagcagtgaaactgatcctggcctcccagctagtgaggaaaccttgattctgttcctgccctgccagaactctgtgagaggtgccccctccgccatcacctgagctccatcgaatgcctgaaatcctcacctctgcaggagtgagtctcccaagaggccctggaggcccaggcccagaccctgggggatatggaagcactcctttgtcgtggcgtgggaagccccacactgctctttccttggtgacgggtgacccgccatgttcaggcccctcctggtctatcttcgggtgagtctattaagggatacaccatctccgctcagccagtcccgaggaggcaaagggaacaggaccctcttccccaggagagagcacactgggggagatggggtggcacacctgggcttcgtcctgtcactgcccactggctcgaggctttcctgcctgcctgggcttggcagatgcgtgagactccctgtctcatgggcctgagcagatgctgggccctcttgtcctctgccacatcctggggaactcagatgaaggccagcctccctcttcctgcacacccaccatgggatgagccctgggctcaggcccctccctgcctgagggtgccctgccactgccacacccaggtttccactcagacccctgctggccagcgtctcaggaggctactccctgctctgcgcagtgaccacatggttagccccagagacccaggttctgcgtgtcttcagtgacagagcaaccccatgcccaccctgccggcttccccggcacctgtctccttgcaggcagcctcctccacttctccagcacacaggtacccacagagctaactgctttgacgccatgctggttgtagacaaaacaggattgggaaaaggggaaaagtggagaaatggtggggaccaccttcctggccgtccgcctttacctggacccagtgagaaggctttcctggctgtgatcttgagccctgactgccgagcagccgagatctatcatccaactccatggctgggagctgggcacaggtttcttctcagaccccgcaccagattcaacccattccacgtgggccagttttctggagcaacttcctgggtcctgtagacccctgaggtctggtccgcaggggtcctgagtcaccagcctgggctgtttccctgccagagacttagctctctgagtctctggctctctggcctgctaagccacacggatcattcgtgtctccctctatctgaatgggtgaactggtgcctcaatggtaggagcctggggcttccctggcacacagtgggtgctggataactgtcagttccccctcttccagtcggacgaggcgccccagccaccatcctgcctggagctcaggtggttcctgggcagcccaacggagcccccaggaaaaccggagcagaggaacctggctttccttctgcgtggtttcctgggacctcttggcagtctctcagctggagagccctgctgagtgatttcacagtggagaaggatggagggaaggaaggggaagagagggcaggaggggagagcccgttgccctggtctgcagggaatagcctccctctgagggagggacactccttgccctattctccctgaccttgggcctcgtggagggcctgcaagcctgccagacccccactgcacacctgcccacctgtctgtctgattccagcagcccctgggcaccgagtgggttgcagagccatgctctgagcatgctccccctccttcaccatgaatgtgttttcattttccacccccgggcagcttcatgatctttcattgcaatctcaggccctggtatccacaggctctcaatgcagcctaggacagaagactctagaattctgcctcggagccctgtgatcccaaacactcagccgtggcaggggctctctgaaagtgatattcttgccacccctcccagatgcaggagggtaaggaataactagaatgcatgggcaaggagattcagctcgatctattcattataaaacaaatttaaatttaaaacattgcttaaaacctatacatgccagtgaagggcgaaggtcttagcagcagacatttgaaggaccaagaatgagcaagacccacctccctcctctagggctgagacccaggaaagggatgcagtgaccacatgcctggaatggtcagagaaaaccctgctgatagggaaggagagacgggggcagtggggacatttgacctggaccttgaaagacaggcaggttgtgataggcagagctaggaaaggatggtctggaaaagggctctgcatgggcaaggtcacagagggaggaccaggcaggctggatgatggccagaggcccagtgcggtcacaggctagggcatgaatatgggtgaataggataactaggggagggcatcagggccaaggccaccatgggctggacagtgatggggagggagggaagaggagagccctggagccccccaagcttttctggctgggtccacctgggctgcacagactgaaagaggcagagccagaatcggggcctctggatggggaggactgggctcggttgaccttgggtttcgaggtctgtgtcttggacagcagtgcccactgacattgagaaggtagggctggggttcacaggagaggtgggacctggaggtgactgccacctacctactggtcacagccctgacagtgtcacctgggggtagtgccaagggtcgccaagggtacgggtttgagagggaagatgaaggtcaagacagacagtagggaaccctggattcttccagagcccggggaggagaggaaaatagaggatgaggcaggtatctgctgcatccggtgggccagctgctgccaaggaggcagcctctgttgagaggggaagcagagctgggctcccaggagcagcgagggggcgcaggaccccagattcagcaccaccagcttccaagcactcgccaaccaacttatacccatctgactgaggcagaaacactgaaagtcaaagtggcttccctaaggcctccaagctactaggcgcaggagccaggaccccaagccagagtcccaccctggtgacctttggactttgccgccaatggctctggagagatttgaccgtgaaaggaggaaaaggaaggtgagggcacagggtggctccggggctggcgggcgtagacgaagccgctttgctgcttaaccgcaactgccagcagcaccctctttcgtccgcccctttagagacgatttcaacggcgcattcttccatttcctgccttaatggggggcatttctggggacacccgtgaactgcgggctggggcttagccttgttggttgccctgcataggttggctgcgtagtgctttacgttctgtgtaagaattgtggagtcttggggcctgggtgggccgagggtcctgagatatcggtgtgcccagcaggcttgtagggtgtggcacctgcccagccctcaggggtcctggtgcagcttagcaagctccttggccaccagtccctggtgactcagatcaggggttccaagaacatgctttgagaaacactccctagccctagccgtttcagtctgtcagtgaacctgcccacctctacttcttaaggaagcacacgaggaagctgtttgtgatggttgaaagctccggcgagaagggctttgcgggggtttctgtaattcttgggaacatgtgaagcccacattctactggaatgacctgctgcacttttgtgagcttcaaatctgagatgtgctttcatcctcccgtgtgtggcagggcgccttgttagtgtccaggcctcttggaatgtggtttggttcaggggtactgatggcccgagtgcttgcccacggcagaggaggccaggggtcagtacaggagccagtcctcgccaccctgttcctgaccatacagagtctgtcacctgcctgtgccctgattgtaccccatctgcaccgtgtctgcaccctgcctgcgccctgtctgtaccccatgtgcgccccatccgtaccctgcctgcgccatctgcgccctctccgcaccctgtctgtgtcgtctgtgccctgtctgtgccccgtccgcatcccgcctgcgccctgtctgtgccccgtccgcaccctgcctgcaccccatccatatcctgctctgctgtctgcaccctctctgcaccctgtctgcgccgtccgtgccccgtctgcaccttgtctgtgccccgtccacaccctgcctgcactctgtctgtgccccatctgggccctctgcacgccctacctgtgccctgtctgtctagatagatcctgcagcgcctcccgcctctgctcagccagccccccgcaccccctagagggtattgcctttccatggaaatgagtagcaggtatttttagtcacccagaccaggaggtattcaggtgtcacagacacaaggcccggagccatgttgtccctttgctcctacaaaggaaacaggatgcccaaaacaggacttgtaaatcccaactcaaaacctccccgttccgcagggacacagggtgctttgctccttgaaggagtagtggatgcctccttatttacatccttcgtgcttacaaggcagtgggggtgtccaggggacatcagccaccctgtgctggggcacttcagaggctccggggagctgccatgctctctctccatcccaaaagatgggtctggggaggccactggggcaggcgagcccgctcctgtgaggagtgaaccccaccccccgccgctctgctggtgtgagtgacagttatcaacagaccctgaatgggggcttcccagaaaagaaaaaaaaaaaaaagaaaacagtgatatccctgggagaaaggggcctgtttacatgaagcctataggccgttggaatctgaagtagcacctgggggtcctggtgacgccagcacagacagccctctccagggcagtgctacagtgagaccagggtctggggaatgtcacttgctcctcattaactcatgaatcgggagccaggataaggtcgctgccctcagggccaacatcagagcgggaggaggtgtatggtccagggcaccaaggcgtcactcaggccaccaccaaagcatcacaccaaagcattgacagcgtccatctcacatcgtcaggaaagggggaagcactggatggctgtggcctcacaggcagggagagtggggtccaaaggcgcagagacagcatggggtgtcagggcactgcagggagagggacaagggcaggtaaggagggaccttggaggccggaacatctttcacggaggcctcctgcttcctctgtgctgctgagctgggccattcatctggcctgggtggagggaagctgaacagggtccctctgcgacctggaggccccaggccctaccctgagcccttggtgctcttggagccctgagctgctccagctgcatgtgatcaccacacacacacacacacacacacacacacacacactctcccaacacacacacagacacacagagcctgtgccaccagccctcattctctgcctcacccagggccggaaggttctggctaagcctccgggggtgccactgggagggatgcctaggagagggtctccccaaccctctagcaacctgataatcatgatcaccggttgttggagtggcctggccacctgctgggctgtatgggtgctgagggcctggctgagccccgtgatacacccatgggggtgggtctctgaagagcagtctgtgtgagcagcaggagaggtggcacctcaggtcaggggacgcttccccccaggctctggaggggacaggataacacctgtccccaggcttggcggaattcctggtctctaacgcagcccggaacacacagagaaatgatccagtgtggggcagtgttgctcacatggtggtaggactgggtcctaggctcctggagccagcggcctcagaaagcccctctaggttctctgagtctttgacactgtgcagcccagactcctcattttatagacagggaaactgaggccagatgactcatccttgacagagccgggatcatggtgcagctctctgactgagccccctcgatgtcctgtagtctctccaagcatgccctgcagtggtcatgactgctgacatctgtccctgcctagactgtgggcctcgtgaggacagaacatgcctgctgtccccatcacctctgtcccccagctcagcctgactggtaatgccccggccatgtcatgaggccttggaaccaagcctaagcttcctacaggccagcaaacatcgtccccagcactggctccctgatttcatctcccctggccgtggcaggcagagagaagccttcagaaccagggaggaccagagggctcctggcccaacggaggccaactgtgacaccaagggatcctccccaaggggtcttccccgccagatacaatcctgctctgagcaccctgaacaacaggcagtgcccaagggaggccagagacagccgtggcctctggggcctggcactcagccagagctggcaggaggcggggatgcacctcctgcagctgaggttgagacaaagccaggtgcctgccacggcagctgtggcctgagctggcatcggtggctgatggccacagactccctgatgcctgtcatctgtactgagggctctgtcccagcccctgaaccgtacgtgatgcccacaccaccgatgaggacacagcttgtgtttttacaaacgaggcacttaattatgtggaggtaaatcctttgaactgcagaaaccatcccagcacgtccccatcaggtgttcccaggtggcaggcagagaaggccaaggtcccttgagtggatttccaggggagctgaagggctacggccctgccaggactgggaggtactgggaggggctggacagctgagagcggctgcccccctgcaggaagaggaggcaggcgcttcacccgactctggacgacgctgacagcagtgtcaaggactctgccgtcactgttgtcctttgagttggcagctgccctgtgttgcagatttgctctggctctggccccctgcttcgtcccctccacacatttgttcttagtcctcagctcctcccgtctctgtgtcccgggtgagaacaggtcctagaccttgtctcaggtcacacagctaccagaggacagagctagaacatgaccgcagcagacgcctgatcctgcgccccaggcgacccgttcacggggcgggcgctcgcccttggcctcgctcctgagccacagtcaccagggtgccaggtaaagggaaaccacatgggggcgaggccagcgcacagccccagcagcctggcccctgctggctgcaggggctccagagcctgtgctacaagcccgggtggccggagcctcctgcgggattccccatcccacccctggaacttgctttccctgcttcccacacacagatcctccccaccagagcagggtcatggggtcagaggcagggtccgtgtggtgtggagcaggggttcctccccactcgctcgctcggctgccttcagcccctgcagacacgcaggcaccgtccaccttctccactcttagcgcgagccctgccccagccaggagcactcactgagtggccacattataccctcccgtttgtctatagttcacttaaacattatttcctgggagatccggcagctcttcactcttccgaatcaggctgtgggaaacgtttgtgtgcatctcgctttatttcctctcttgaactattaggataaagtcacagaggtaggattcctggaccccaagctctggacctctactacccaatttcaaaaaggtcgtagtatatagctcatgtcccagaaccagccacgtctcctcgtcgtcgtttcaccgcaacctcgccagcaatgagtattttcatttaaaaatgtttttgtctgctggctatgtgattgcagaggcatggctggccccagcttgcagcggtcgcttctgcatctctttttattcagcggggcctttaatggatgtggtggagtaaagctgcctttcaaattgctgccgcagcgctgcctggcaagatgttaatcgttcatgccctgtcacgtggtcatgggacggtaatcctctttgaagccatttgttatttattcttacagtcccccggagagcagggaggagcccccagtgcctggatcacaaacgcaaatacagagagggctgcagacatttcagcctcgaggttggagcagaagcagggctggggcccaccagggtccagacccctagtaaagaggtcacttcccacaaaagaaggttgtttgtctgcttctcatagaacctgctctggttagagggtttttttttttttttaagagacacgatcttgctgtgttaccgagtctggtctgaaactcctgggctcaagtgatcctcccgccttggcctcccaagtagctgggactgcagatgggcattgctgcacccagcttggttagagggtttttaagcctagggggtgcatttgtttcctagtaccacaagcagggtggcttgaaacagcattatttattctctcatggatcaggaagccagaaggcaaggtgtgggcagggttggttccctctggagaccgaggtagcatgtgttccaggcctcgctcctggttcctggtggctgcccgtagtgttccttggcttgtagaaacacccccccgagattctgcccccatcgccacatggccttttctgtgtctgtctcctctttttatatggacacttgtcattggatttagggcccatcctaatccaggatggcctcatcgcaggatttccaccttaattacatctgcaaaaacccttttgccaaataattccacatcgacaggtaactgggattatgacttgggtggatctttcagggaacacagtccaccccacacaataggtttctacccccgagtcccacctccagccccgtctccctccagagtctggctgcttcttcctcatcagacagttccttccctctgtagggattgcatacaagtgttgctggctgaggggtgagggtggagtggggggatgtgggagctgagctgagggatgagggtgcaggcagagatctgggagctgagctaaggggtgagggtggagtagggggacgcgggggctgagctgaggggtgagggtagagtgggggacatggaagctgagctgaggggtgagggtagagtggggggatgtgggagctgagctgaggggtgagggtgcagtggggggacgtgggagctgagctgaggggtgagggtagagtggggggatgtgggagctgagctgaggggtgagggtggagtagggggacgtgtgagctgagctgaggggtgggggtggagttgggggatgtgggatctgagctgaggggtgagggtagagtgggggacatggaagctgagctgaggggtgagggtagagtggggggatgtgggagctgagctgaggagtgagggtgaactgggggatgtgggagctgagctgaggggtgggggtggagttgtgggttgtgtgagctgagctgaggggtgagggtggaggcggggacgtggcagcccagctgagggccttggagcacacctggtaggaagccagcctgtggacctggagccgactgagggtcccccctaccccccatgagtaggagtgggatccaacctgggtcccctctctcccctcctgctggtgtatttgtagttggaaggcagcacaccctcctggctcagagagatgggtttagtggcccggggaggcacggaagcccaggtctgtcttttcccagcggtcactgtgaggatgcagggcccccacgtggggagacagggcacagcctcccattggggcagatgggggtctccctgcccaggatgccggccggagtttcccctggcagggaccacgggtgctgtgactggagggaggtcccagggctggcaccctggggctctgttctgatgttctgatccattccaccctcacccctcagctcagctcccacatccccccactccaccctcacccctcagctcagctcctacatttcccactccaccctcacccctcagctcagctcctacatttcccactccaccctcacccctcagctcagctcccacatccccccactccaccctcacccctcagctcagctcctacatttcccactccaccctcacccctcagctcagctcccacgtccccccactccaccctcacccctcagctcagctcccacatccccccactccaccctcacccctcagctcagctcctacatttcccactccaccctcacccctcagctcagctcctacatttcccactccaccctcacccctcagctcagctcccacatccccccactccaccctcacccctcagctcagctcctacatttcccactccaccctcacccctcagctcagctcccacgtccccccactccacccccacccctcagctcagctcccacatccccccactccaccctcacccctcaattcagctcctacatttcccactccaccctcacccctcagctcagctcccacgtccccccactgcaccctcacccctcagccccactccactcccacccctcagctcagctcccacatcacccactcctcccctacccctcagctcagctcccacatccccccacttcaccctcacccctcagctcagctcccacatccccccactccaccctcacccctcagctcaggtcccacatcccccacttcaccctccacccctcagctcagctcccacatcccccacttcaccctcactcctcagctcagctcccacattcccctactccaccctcacccctcagtgctctgtcagaagcgctacctgaccacatccctcctctgggctctgagttcccctgtgcaagtggaaccaatctttcccctcaacttcttccaagggccgtgattgaaacccacctaaaatacaatgataagagctgttgtcgagggatcagacagcagcctgtgtaagatgagcactgggttctggggaaggacggtaaacagttcgccttattctgtgctgggcactgtgcttaagcccagcagcgggccctggctggactcagtgtccagagtgtctctgctcagggctggccgagagtcagcgctttctgtccctgtggcggacagtccgacctctccgaggctgccatagagactcatatcagccaggcgagctgggagcgccaccactccccagatagttactgcccgggcctccctgcccagtcactgcatggggggggctcagctcctgggtgtgagtttgtgccaggctccagagaggtggggaccccagccacacccagggacagggccaagtggccaagagaccacttaaatgccagcgtggccaccccatgtaaagcaatgatctctctgaaattgctcatctggtatacaccaggacactggcctcttcttccttctcccatcctgggatttaagaagttaaaacccaccccctctgcccaggaagccgaggcagcagcttggagccagagccggaggcagagcggctccatccgtggggagccgcgccacctctgcgcctcctccgcgcctcctctgcgccccgcgccgtgctgagtcaggctctgaaacgcagtcatcatccggaagtggttcttgctgtggccccatccccctgtgtgattttcctaccttggctcacttaaaatttcaatctggctctgagaggagactcagcatttcctttatctccttttactgtggatgcttggaaaggagtgggagaagctgggcgccgcagtgtgtgcgcgtcactgttgcccttacccccgaaggaggggatggccaagagaacctggaacctcccctcccgtccctgtgcccgccgcttcccttggccctcactgatgagcccaacagatgcagaggctccttctctccctggcactgcagccaggtagaggcagctgcagccgcagccctgagaggggctggagacgctgaggcaggggcagtggtggggtctggctcccctcagttcaaagtggcctgcagatgctgcctggagctgtctggtttgacatggctccctctgagggagctgatgagtgagggccaggagcactacttcatcaggcatcccctcacctgcaccaatggggaggcgaacctggagctgggccattaagacccacagattgttttctccatgttgcgaagggcagggcttggatttcacgaggcagatggtgagccaagtccggttccgctgcgctgggtcccccatggcagaaaggacccgcccccccatcaccctgacagtggcttgcatgcccaagagcagccagcatccaggacaggcttccctcgttcctctgttcatcctctttaagaatcactcagagccaggcacggtggttcacgcctgtaatcccagcactttggtaggccaaggtgggcggatcacctgaggtcaggagttcgagaccagcctggccaacacggtgaaaccccgtctctactaaaaatacaaaaattacccaggcatgatggcgtgcacctgtaatcccagctactcgggaggctgaagcaagagaattgcttgaacccgggtggcgtggtggaagttgcaatgaaccaagattgcaccgctgcactccagcctggagacggagcgagactgtctcaaaaaaaaaaaaaaaggatcactcaggacaccaacatgggctgagaaatgctcctggtatcaacagaactgcagcagatgatgaaaacaaggctgtgatcagggaagtggctgagggagtgaggcccccgaaccaccaccccagagctctgtcccaggcccctggggtctcatgctgtgacctcctgcgccacatggggagaggtcacctgggggacttgtttccgtgggaacctcaggccttgggcctgagtgaggagatgtctgaagcctctggcctgggcggagagtgagaccccagagcagccctgcccattcctctgggagcagcctcagtgaaagctgtaaagcagggaaattggacacgtccaggccagaaagagcaaagcaaaagtgcccctgggtgcactgcaccccacagtccaacccttctcccccaggagctgcaggccacgctctgagcctctgtttgaagtggtccctgactggacattctcatctcgggacatgagctagggtcacccagcaccactatgcagctctccaagtccccctggccaccccgccctctgtaggggtgctgggccttgctctgcacctatcccttggagtatctgctttccagagcggcaggaggcccgcctggtatgcccatgggggcatccacctgtgcagagtgtggcctctccccagcagatcgctgggtacatgagcaggcagcagaccataagcaggctggctaacgggtggagggggcccggtggtgtccgtgtgcgtgtatgtgtgcacacgtgtgcatatgtgtatgcacacacctgcacacacaccttcagatgcacgtcccctgtctagaccccatcaaagcctcttgccaggactggcctggaacacactgtccagcctgattctgttctctccctggcttctcttgatcaacttcctgtaatgggaggaactctgacacacttcacaaaagggtgtcaaattagttttaaagggaaaaagaactgcagcatgatctggaattcgctttctgccctgcggttccactgtgaaggcaacacgccttcgaggagttgggggatgaggcagtggggccctgtgaggccctgcggtttctatcggagtgctctctgacccccggtgttccctctctgtctctctatgtctttagcaggtgtttcccacactttagtcattggcctttcatctcatgatttgggtcatctgtgctatttcttttctttttttctttttttttttttttccgacagggtctcactctgccgcccaggctggaatgcagtggcgcaatcttatctcactgcaacctccaactcccaggctcaggcgattctcctgcctcggcctctggtgtagctgggattacaggcacacatcaccacacccagctaatttttgtatttttagtagagaaggggtttcggtttcaccacgttggccaggctggtctcaaactcctggccccaagtgatccacccgcctcagcctcccaaagtgctggcattacaggtgtgagccaccgtgtccagtcatatgtgccatttcttagcttgcatttcctttttagttagttaaacttatttcttaaataagcttattttaaactgaaacttgatgtccctgcaataaagaaccagcattacttgtcatcaataaaaggtaactggaggcaggcatggtggctcacacctgtagtcccatctgctttcgaggctgaggcaggaggatctcttgaacccgagagttcaagttcaacctgggcaacatagcaagacctccggcccttaaaaaaataaaaagtaactggaaaaataagtggatcaatattaacttcaaggcctgtctcaagtgtggccaaggctgtctcaaggcagcacaggccttgctctgaacagccctggatgagccacagctgtgtctggggattgaagagagtgcccctggcccctccctgctccggtcacccccagttcctttagttcacagccctccatgttgtcaagggctgaggagtccctcctcgtccctgctcaggtgaacacaggaaatggggaagcccagggtggggtgggccgccccatcttccccttagctgatgggcaggctggatgggcagggagggtctttcctgggaaggtagtggcccgggagctgggctggccctcgagtgttgaagatttaacttgaaagccatgagggcgctcttccccagaaatcatcgtggaagcggcgaatgagtggcaggaggtgcatggacagtcctggctctgcaggcgagcagcctgccccagctctttcctccttagaattgtgtgactttagccacatcatttagaagacacagatgatagaggtggtagaaatggaaagtgcaactctctacctgctgttgcccaccaccaggacgaccactgcaaatagtgtgggtgacccgttcagacctgggactcagccacacattggcccctgaggcagatgaagtccccagcagatggggagatgcagcattgctctgagggagcagcaggagtgaggacaggagctgccacgtgcacaggagcaggagggaaacaggcaggcagctgtgcccagggccaagtgtgcaggaggcgaggcaggcagctgtgcccagggccaggtgtgcgggagacaggcaggcggctgtgcccagggccaagtgtgcgggagacaggcaggcggctgtgcccagggccaggtgtgcgggaggcgaggcaggcagctgtgcccagggccaggtgtgcgggaggcgaggcaggcagctgtgcccagggccaggtgtgtgggagagaggcaggcacgtgtgcccagggccaggtgtgcaggaggagaggcaggcagatgtgcaggggcagagggggttgaaggatggaaaggtagacaggagaggctgtgaatggctctggatgccgagctgaggcacttggacgtcatgctgacagccctggacctccacgaagggcttttgagaaaagcatggcatgaaaagatctgctgttgagaaatagaaacggggctctggtggcaggttgacaaccatggtccaggcaggagcttccaaggcaagtggtggaggtgggcgagagggagagttccagggatatccgcgtggatggagccaacacctggagcccagggcaggggggtgggctgaaggggcacctgtggggcccttgcctgtggaggtgagaactgcagcttggagagcagcagaattgccccccggaaggttgctaggggaagattcccagagaagctgaaagcagtagtgctcagaggacaatgagctggcctaggatggtggaggtggaggtgatgaaggcagagggggcagaggccatggtggtggtagaggtggaggtgatggaggtgaaagtggaggtggtgggtggaggtgatgaaggtggaggtgatgaaggtggaggtgatgaaagtagagatgatgggtggaggtgatgaaggtggaggtgacgggtggaagtggaggtgatgaaggtggaggtggtgggtggaggtggagatggaggtaatggtggaggtgatgaaggcggaggtgatgggtggaggtggaggtgatgaaggcggaggtggtgggtggaggtggagatggaggcagtggtggaggtgatgaaggcagaggtggtgggtggaggtggagatggaggtagtggtggaggtgatgaaggcggaggtgggtggaggtggagatggaggtagtggtggaggtgatgaaggcggaggtggaggtgatgaaggcggaggtggtgggtggaggtggagatggaggtagtggtggaggtgatgaaggcggaggtggaggtgatgaaggcggaggtgggtggaggtggagatggaggtagtggtggaggtgatgaaggcggaggtggtgggtggaggtggagatggaggcagtggtggaggtgatgaaggcggaggtggaggtgatgaaggcggaggtggtgggtggaggtggagatggaggttgtggtggaggtgatgaaggtggaggtggagatggaggtagtggtggaggtgatgaaggtggagagggtagaggtcatggtggaggtgatgggggaggaggaggtgatggtgacagagatagagatgattgagatggaggggcagagatcatggtagaggtggaggtgacagcagtggtggtcgtgagctgtgtgtgtgtttctgtgcaggtgctcacccatgcacgcatgcccatgagatgcctggctctccacacacgccctgtgagccaggcatcctctcggtcagggatataagcctgggcctgtgcaggctgccctctcccactgtggatccccttggaggagactgctgcagctgcagggcaccctctgtcgccctaagaggagcagcagaacatgacctcccatcgctccacttcccactgctctgcttggcttcagcctcatgctggcatctgtgttatctataagcagaaagctgcttgttcagagcgggctgagacaccttcgtgcgttcatcaaaagcgtgctgggcaccaatgaggtgtcagttcctgttccgggcatgagggattcagcaggaaacgagacagacccaccccctgccctcagtgtcccgctggggccagtcaggtgaacagtcacacaggctggggtaggcgcttggcagaagacacacttgtgacgctcagagctctctggagcagcctctccgaagagatgaaatttgagcaggaaccccaaggaacagcatcccaggtagagggatctgagtctgcaaaggccctgggcacaaaagaaacaaccacgcaatccagggctggggaggagccctgtcagaggacagcaccagcctccccacgtggatgcccgaccagcatctgaggtcagacacagccgccactggctccagggctcccccacaccactgcacccacaactcccctgtttcagaaactgaccactcacctctggaaacccaggagccacctgcacccctgtcttccccctacaccccgcatctgtccgaagaccctgcggtctcagcctcttggattgccagccactggtcacctctgtctccccgcccttgcccaggtggccccagctcacacctgcattgcctcggagactcctgacgacacccaccccctgctgctgcccgggcccccccagcagtcggttctcagtgatcttgagaagcaccactcagctcaccctacgaggaggcctttggctgttcccgtatttgtctctggacttctctgctggccatagaacaagactgtgctttagagggtggactcccagaactgccactcaccaggtgaccaaggcaggccagctttacctctccaagcctcagttttctcagctgtcatttgtgcctaaaacatagtactaacctcataggattatggggcaaaaattacgctgaatgaacgcacgggaaagcccttatcccgaggcctcattcagactgcactgggtcgccagcagctctgacatcgctgcccacacattaatacagcccagggctgctgctcagatgggtgtccttctcctgcacccactgtactgggagggcacttcctggatgtccctggacccccgccatccaatgtccagcttcagcgtaggacttggtgtccgcaagaatgaggcccacatccaggagcaggccagtttcacgtgaagcccagggctgaagccagaggccacgcagcaccacgtcggacagtgtttatctgtgctaatcatgaagtaacacaagtgaggtttaaaaatactacgcttatttcatttcagtgcaggagggagaaagaacacacagtctgtatgagcaactcaaatcaaaaataaatgaggcaaaagagtcaccaaaaatagtgtggcattagagacagcagcctgcgtggctcggccagctgtcctcggctctctgccggcaagcagcaccacagagagggctgcgaggatgccttgatggtgtttactccagagaagatgaacctgatgcctgcgatctgatgagaagtcacagttaccagcagggaaggtagcactgaggggacacacagggcacccaaaggtctctggcatcctctcctcctcccgtcaccctcgccaggcagtgaggtcagaggctaggctcgcaggcagcatgggaaccacttggccagaagtttcctctttgacctgaaggagttcccccttccagactcagagtgtccccacagaagggcagggctgtggcttggacccatgtggggctccagcccccagaggagcaggacagcatgtgctgtacacagcaagaggatttgcacttttgccttaattttattacagacggggtcaccttccttttttttttttttttttttttttttgttttttgagatggagtctcactctgtcacccaggctggagtgcagtggcgggatctcagctcaccacaacttccacctcccaggttcaagtgattctcctgcctcagcctaccaagtagccaggactacaggtgcccgccaccatgcccagctactttttgtatttttagtagagacggtttcatcatgttggccaggctgatttcgaactcttgacctccggtgatccacccacctcggcctcccaaagtgctcagattacaggcgtgagcccctgtgcctggcctcaccttccttttttaatgtgtcagaggtctgcaaattatggcccaggggccagatcaggcccaccgtttgtttttgtaaataaggttttattggaacacagccacgcccttcatttacatatttgctgcttttgcacccagagttgagtaatcgtaatcgagatggactggcccgaaatgcctaaaatatttactgtctgtcccattgctgcaaaagtttgcccttccctgccatagctgcgtaagcaccctggggaagcgtcctgtccgctgaagacagctccagtgtcgatggggcttgggtcagtgttgggtttgctatgctaatattgatttggagctttagagatttttggttgattggttggttggttggtttttgggggttttttgagacaggatctcgatctgtcacccaggttggagtgcagtgtcgcagtcatggcccagtgcagcctccacctccccgggctcaagtgatcctcccactcagcctcccaagtagctgggaccacaggcatgcgccaccacgcctggctaatttttgtatttttttgtagagacggggttttaccatgttgcccagactggtctggaactcctgggctcaatctgcccacctcggcctcccaaagtgttaggattacaggtgtgagccatcacacccagcccctagagatgtttttatttaaaaaagaaaggagattctgcaataatgaggtttctctgatgcaaggaacatcttttgtccagagacatttagtcactcgatgggcctcaaaccccaccgtaaaggaagcactacattccagccaccagcacccacctgctgcctgctgcctgctgacagcttcagctttcagagcgaaggaggcttcccacggactcccaggggccaagcagggtcccccagaccaccctgctgggccaccctccaacatctccgagtgaggggtgggtgggactccacaggccagggctcagggaggacctcgctcctggcgggtcctttcctgggatgcactgacgtcccttggctcttccccagcttccatgagtcacaatggagctatttaaacctggggctgtgagaacatgtcaatgtgtccacccccttgagaccacagggctttcaagacagagcatcctttcaatagaccgtggagccaagtactgaatttgatgaggcgttttcacgaggcctgtgtgaaacacttaaaaattgtgcataacatgtgactggacaggcgtctaccagaaaacagtgcaaggagcttttaagccatgaggtttgcatctgtaggaaggctttggggtgctgctcacacgcggtgtgactcgggcggggcaggcagtagacggcagcggtgacactgcagtgacgctatggagcatggacactaatacgtcccactggacttctgcgtgggccccagacaggagcttgaccagcgtcaactggacctgctgcatctgatcctctcccagagtgaggttttgaacagagatgggcagaacaccactaatcacaccgctgctgaaataggtctgccttctgggtaccggttatgaaagcggatttgtgtgtcacatccccaggagaggaggttatggtctcacaagaggaaaacccagcagaatcccagagttggctggaaagtcaacaaaccacctaaaactcacccacaaaataccgtgaccaggagtatgcatggagacagtgccgagctccgtacaggccgtctgacttcagtgagaccccctccccaccaagacagaggaaaagtcctagactcaggcccacaaggatgggcaaatagggctggggacgcagggtgcgtagagcagaggtgtagattctgcaagggtgtgtgcaaagcagataggggagcacaggtgtctgcaggggaagcatggccttcttattgagctttttttgagatgaggtctcacactgtcacccaggatggagtgcagtggcacgatcttagctcactgcaacctgaggctcaggccatcctcccatctcggcctcccaggttgctgggaccacaggtgcacatcaccatacctggctgtgtgtgtgtgtgtgtgtgtgtgtgtgtgtgtatttttagtagagatgggttttcagtatgttgctgggctggtctagaattccagggctcaagagatttacccaccaggcatgggtggctcacatctgtaatcccagcactttgggaggccgaggcaggcagatcacttgaggtcaggagttcgagaccatcttggccaacatagtgaaaccccattgtaaaaaatacaaaaattagccgggcatggtggcaggtgcctgcaatcccagctactcgagaggctgaggcaggagaattgcttgaacctgggaggcggaggttgcagtgagccaagatagcgcctctgcactgcagcctgggcgtcagagcaagactgtctcaaaaaaaaaaaaaaacttggcctcccaaagtgctgggattacaggcataagccaccacacccagccaggcgtggcctaaaaggctgtgttcctggaggagatgttgtcctggaacagggttcagcaaaaaaaaatttttttttagacaagatctcactcagttgcctaggcgggaatgcaatagtgtgatcataggcgactgcagccttgacctgccaggctcaagcagtcttcccacctgagccttgcaagtagttggtactacaggcacacacctgtaatcccatagctgtaaaccacacccaactaattttttttgtaattttgtagaaaaggtgtctcactgtgttgcccaggctggttttgaactcagctcaagcaatcctcccaccacagcctcccaatcccaaagtgctgggattacaagcatgagccactgcgcccagccaggcaaatgttttcatagaggaccagatagtcgatgttttcagcttgcaggaaattcagtctctattgcaactactcaggtctgccatagtagcgtgaaagcagccccgggcaatatgtaaataggtgctgtgtactgaatgtttctgtcccccaagattgatagccctaatcctcaatgtgatggtattaagaggtggggctctgggggtgataaggtttagataagctcaggtcttgctctgttgcccaggctggagtgcagtggagtgatcatggctcactgcagcctgggcctcctgggatcgctcaagcgatcctccaacctcagcatcccaagtagctgggaccacaggtatgcaccacgacgcccagctaattttttttattttgggatagaggcctcacgacaggactagtgccttggtaagaagaggaaaaggccagagctccctccctaccctgtgtggacccagcaggaaggaattctgtctgcaagagagagccctcacctggaaccaaatcagccaggaccctgatgttggatttaccagcctccagcaccgtgagacagaaacgtctgctgtttcagccacccaggttgtggtatttcattatggcattcccaagctcactaagataacaagatagcttggctacctggcaataaaactttatttatggatgctgagattgggaactttatataaattttgtgtgttatgaaatgttattcttcttttggttttctttcgtttaaaactgtaaaaattggactgggcacagtggttcacacctgtaagcccagcactatgggaggctgaggcaagaggacagtgtaaggccaagagtctgagaccagcctgggcaacataacaagattctgtctctataaaaaattataaaattagccgggggtggtggcacacacatgtagttccagctacttgggaggctgaggcagacggatcacttgagcccaggagttcaaggctgcagtgagctgtgatcatgccactgtactccagcctgggcaacagagtaagttcccttctcctaaaaaaaattaaatgaaataaataaaactgtaaaaactgttcttagctcgagggctgcacaaacacaggtgacaggctggcgcagcagttttccaacccctgtcctacagcaaggagggaagccgtcacactgcactctctgctggccagccggtgtgcagtgttgctcaggttctgggtgcctctgtcatttaggaaggaatcagcaccattaaaagagagtggcagggtgctgatgttccagagagaaactgtgccgaatgatggctaattaaggctctggagttgggcactggagcaccggactccctgctctccaaagcccagcttgccagcctcgacctgagcgtcttcactgatacagcaccaacccgaggctggcctgtaaggtttggcgagggtccagtgtcacagcccacgtgcagcacgtgctgcacagtgtcggccaaaattatattcatggcttaagtcagaaaccttgtgtggaaggagggaaagaagcaaggtttgctctcaagaacaaagggcccggttgtagatggggtgagctatggcaggtgtcctcagatgctccagggattgtcctagacagagggactcacttcgttgtcaatctccggagggcggagcaggcccagcaggtgaaagttatgaggaagctggtttccaatcagcatgcaaaggaccatgttgtcatttcagttgtccccagtgggatgatctgcctagagtttcccacaggtggaggtcttgcggaggggggtcatgcatcccccggagccctgtacctggggtcccgtctctgcatgctcggaggcttcacgacatgtaaacctagttatcttggtaacacttgggggatgtgccccctccccacagtcctggcccagaggaatgaagttacatcaaagcaaattgattcggtcgttgatccttatgttgtagaaatagctagaagctataaggagaaccactgtgaggtccccattaaaggagaagaattttggtggtccccagacagggctggctcgggatctcgttctgtggtcaggaccacctgctgcagtacagcctcccacctcagcctctcagactgccaccttctgcccccaatccagcctgagatgcccccagcaccacccctgctgaaaacagaagcagaacctgatactcagcctcttccatgacaagaacacaccaggatcgcgtccctttccaagcagaattttcccgaagccccaccctcctggactcgggttatggaccgccacaggccaccccagctggaagaaaattcaggaaatataggggtcatgggtgacaggtgggccagccagcaaccgtatctaccacatttttaaaatttctatttttattatttatttatttttgagacggagtctcgctctgtcacccaggctggagtgcaatagtgcgatctcggctcgctgcaacctctgcctcctggattcaagtgattctcttgcttcagcctcctgagtagctgggattacaagtgcccaccaccatgcctggctaatttttgtgtagagatggggtttcaccatgttggccaggctggtctcgaactcctgacctcaggtgatctgcccgcctcggcctcccaaagtgttgggattacaggcatgtaatcccacctgtaaacctgtaaggccaccacacccagcctaaaatttttattttcatatatattttttgagacaaagttttgttctgtcacccagctgaagtacagtggcacaatcacagctcactgcagcctcgaccttccaggctcaagccatcctcctgcctcagcctcccaagtagcctggactgcaggtgcacatcaccatgcccagctaatttttttattttattttttgtagagacagggtttctccatgttgcccaggctggtcttaagttcctgggctcaagcgatccacccaccacgggctcccaaagtgctgagattacagagatttcaggcacgagccaccatgtgccatgtttattgagccagcttaaatatttggcttaaacacatacacccaaatgtggagctgctgttgactccatgatgcagaagtttctttttctttttcttttttcccagttttttctattgtggtaaaggtacatataaaatgtgccatcttaaccacttttaagtgtacagtttagtggtattaagtataaaattcaatagtattaagtgtatagttcagtggtattaagtgtacagttcagtggtattgagtatacagttcagtggtattgagggtaaagtgcagtggtattgagggtatggttcagtggtattgagtatacagttcagtggtattgagtatacagttcagtggtattgagggtaaagtgcagtggtattgagggtatggttcagtggtactgagtgtgtagttcagtggtatgagtgtgtagttcggtggtattgagtgtacagttcaatggtattgagtgtacagttcagtggtattgagtgtacagttcagtggtattgagggtaaagtgcagtggtattgagggtaaagtgcagtggtattgagggtatggttcagtggtattgagtgtacagttcagtggtattgagggtaaagtgcagtggtattgagggtaaagtgcagtagcattgagggtatggttcagtggtactgagtgtgtagttcagtggtacgagtgtatagttcggtggtattgagtgtacagttcagtggtattgagggcacagttcagtggtattgagtgtgtcattcagtggcattgagtgtacagttcagtggtattaggtgtatagttcagtggtatcgagtgtgtagttcagtggtattgagtgtacagttcagtggtattgagtgtctagttcagtggtattgagtgcgtaaattcagtggtattgagtgtacagttcagtggtatccagtgggtagttcagtggtattgagtgtatagttcagtggtattgagtgtacagttcagtggtactgagtgtatggctcagtggtattgagtgtacagttcattggtattgagtgtacagttcggtggtattaaggatacagctagttggtattgagggtacagctcagtggtattgagtgtataattcagtggtatcgagtgtgtaattcagtggcattgagtgtacagttcagtggtattgagtgtgtagttcagtggtattgagtgtacagttcagtggtattgagtgtacagttcagcggtattaagtacattcataatatatgcactaccatcaccaccatccatctccagaacctttttattctcccaaactgaaattctgtccccattaaactggaacttcccattccccctcccctgcccctgagggccaccattctgctttctgtctctaggcacgtgactactctagggacctcagatcattggaattgtacagtatttgtcattttgtgactggcttatttcacctagcagaatgttctcgagactcatccgtgttgtaccatatgtcagcatttccttcctttgtatgactgagggatgttcccttgcatgtgtgtgccacattttgcttatctttttttttttttttttttttttgagacagggtctcgctgtcacccaggctggagggcagtggcgcgatcttggctcactgcaacccctgcctcctgggttcaagtgattctcatgcctcagcctcctgagcagctgggattacaggtgcctgccatgacacccagctaattttgtatttttagtagagacggggtttcgccatgttggccaggctggtcttgaactcctgacctcaagtgatctgcctgccttggcctcccaaagtgctgggattacagacatgagccaccatgttcagcctttgcgtatctttttatccatcagtgaacctgggttgtttccatgttttagctattgcaaatcatgctactgtgaacacacgggtacaaatatccctttgagaccctgtttgcaattatttagggtatatccccagaagtggaattgctagatcatatagtaattcgacttttagttttcaaagaaccaccatactgttttccatagtggctgtaccattttacattcccaccaacagtgcacagggtccccatttctccacatcttgccaacccttattattctgggcttttttatagcggccatcctaatggctgcgaggtagtatctcactgtggttttgatttgcatttccctaatggttactgacgttgagcaccttttaatgtgtttattagccatttgtgtcttgtctttggagaagtatctattcaagtcctttgccgtttttgtaattgggctgtttggttttctgttgaattttagttctctatgtattctggatattaattccttatcagatatgggatttgcaagtattttcactcactctgggttgccttattactgttgatagtgccttctatttttctttacctatttatttatagaggtgggtcttcttatgttgcccaggctggagtccagtggcatgatcataactcactgtagcctcaaactcctgggttcaagggatcctcccacctcagcctcctaaatagctgggaccactggcatgcaccaccatgaatgactaattttttttttttttttcgagatggaaagtttcactcttgtctcccaggctggagtgcaatggcacaatctaggctcactgcgacctccgcctcctgggttcaagcaattctcctgcctcagccttccgagtagctgggattacaggcgcccaccaccatgtccagctaatttttgtatttttagtagagacggggtttcaccatgttggtcaggctggtctcgaactcctgacctcaggtgatccacccatctcggcctcccaaagttctgggattacaggcgtgagacaccatgcccagctgccaggctaatttttaaattttttgttagagattgggtctcactatgttgcccagactggtctcgaactcctggcctcaagcaatcctcccaccctggcctccaaagtgctgggttacaggtgtgagccaccgcacccagccagtagtgtcttttaaatgaagtatctctaattttgccactcagcatttaccagtcacctgccttcctggtccaaagaaactttttaaaaaaagagttggcaaatatctgaaaatacaatttatttttaagagccaggaatgaagctgaggtttgagggctggttcagtgtgtctgaaactgcgaagcagccagtgaggttactttcgcatcccctagcttttacctctgctcgtgagattcagcatctgcagctgtggtctgtgatagccgtgaatacagtctgtgtttggagacccacagagtcagggcaacatctccgtgctgggggccaagaggataacggctgttctctggctctgggaggcagcagaggtcacctgtccagagccagagttccatggggggctccagggcaggaggtcaaggtatgtgtgaggaaagaaccccaatttcgagctggacacacctaggctctggttccagctttgccactaatttcaccaagcgaccttggatgttatttaatattcttgggcctcaatttccccatctgtaaaaagcatgtcatagtcagggttgggagcaaggcccagagctggctcaacatgggttgctgtcccccagctctccgtcatggcgcctcgctctttctttttcattttcccattcgttcgccttcctccttctcccttctccctcctgtttgtctctcgacacctctactttcctagtgagcacccagactattttattttcccttccttttcctctttctacctcccctaaccactgtctttatctttatcctgccgggaacacacagcagcacccctggtgtaggcttcagagctgtgtacctatgccaggagagggggtgccagcctccctcctggaatcacacacacgggtgtggcctgggaccagggactcaacacggtgcaggtggctggcaccatgggagatggaatgttccacccgagtcctccctttgcctggtaccccaaagagcttgggctgtgcccagagtgagtcaccagagagcctggccccaggctcagcagctggcgtaggagggaggaggggcctccccaagaaggaatgaggggcctccccaagaaggaatggcagagcagggagaggccgcggggagggagaaaaaccccgcagagggtgctcttacctctggcccgtcctccccagggccacctgtcccctcaaggcggctgccccctctgtgtcctggcacaaagttgggagatggagtggcagagcctgccctgggcttctcagcagtgcacagctcagagcacactttagagtcagccagccctgagtccagggctctctgacccttcgtgttgtcacctgtagcatgggggggcagcagtaccccttcccagggcagcagggaagataagatgagggagcgcaggtaaaaggtgggcagcccaccccagcacacagccgatcccggcacacagccgatcccggcacacagccgatcccggcacacagccgatcccggcacacagccgatcccggcacacagccgatcccggcacacagccgatcccggcacacagccgatcccggcacactgctggcagcagtgaggggagctcttcaacatcaccagaaccctctgccctgagaaaggggctcctgggccgacagggaaggtctgcctcctactctggaggggccgcttggggacaggcccgggctgtctcctcacagccacctgcttcctgtcctctgcctgtctcctgccccatctggccgctgctcatccaggaaggtcggagatgtcgggccctcccacctgggtcacgcgctaggcatgcctgagagcaaaggccacgccccgacaccccacggggccctggcgcgccaggcttctcagccctgcggcggcagtgcatagctctggcacgcgctgcaccaacttcctgttgggtgctgtggtcccaaggcgcgtgctttgcagcagatgtgtgacctggcgttcccctgagtgctcggaaaatggccttgtctccggtcgttcccgttcaggagcaggtacctggggtgctccggggatcccgttgtctaggatgggttttctgtctgacgggtgggcagcctcagctccctgagcagggcttaggtcccccgtaatgtccagggttaattgtgccagcctgaacccctgagccccgcatgcccgcctagggattggcctcagcctggggtgagctgaccccaaagacaccctgcccaacgcagcccggcccttcactgcttcctgttgctgctgctggacagagtgggcctggcacccagcagagatgtctgacggccgcacattctcccctggcttctgccttcatccctgggatgatgttgagggagacgccggaagatggagagccatgtggggccacctctgtccctctgcagggggcagggctggcagctcctggggagagccctgcccatcttgtctgctgtctctcgggaggccctggcctggggattcccatctctgagtggaaggcgcgaaggcccctgccttgaacatggatggcgtgggtccccagtccctcctctctcccctcccccttggggctgagcacagggcagtggtgggggataaagacccctcagaacacttccccaccctgcaaccccttgcacagccctgagtcactgtcccagaggggagggcaaggggctccctggtgatggcttcctgcgtcccctctcacttgcctcctccatttcccctgggcaggatatgggtgcagggtgtggtcttggagggaggaggctgtaagcctcctgggggacacagtgtgtgtgtgtgtgtgtgtgtgtgtgtgtgtgtgtgtgtgtgtgtgtgtgtgtggacggctgaagggaggaggccgggggcctgggtgtgcggctatggggactgaactgtcgagggctcctgctgcctctgcaggggacaggccctgccagctactgagtgagcagcctgcggcagccctgactcactgcgggtcgtgccgtctgtgcagcactggggtacccaccacccagtgccaggtgagcggccctgcacggcaccgtagtttccacctgtggtcactgagaggcaggatggagctagggcaggcatgggaattttttggctgtggtctattttttgttcattgcagcattgattacatgtgaatgtggactgttcttgcaaaagtctagacctgtcgtatttgtaatcagggaacaggcattgaacgttgctttgaagagattgaaatttctagcttgtgatcttcttgaaaattgttaatgaggcgttgatgtgatgtaccatcaaatgctccgttcggcagtcatgaccttgggcaccgtggttaggtcccaatgcttctgctgttgactgaaccatgtgacatctgtcgccgtgccactggtcccctcggctcaggcctcaggagattggaggagagactgaggtttctctgtgacaaacacagggaatcctgactgggatctccaatctctagtaaggtttgcacagttcttctcctcgcatttctttggctgcatctgagccaaagtctggatggagctgtcggggaactgggttatgttgacctcccaacccctgcccaccctctggggtgtccttctgacaaatgggcctttcttccagatccccatcatgacccaccaggccaacggccccctagggtcttgaccccagtgcactcagagtcagcacctgccttcgttgcagcattgaccctctgccatcagatcccacccagggaaggaatgggctcctgtgtgggctcctggcttctgggtgagaggggaagtgtgtgttgtgtaagtgcccttctgtgtcatgcggttttgagcagttatacctcttcctgtctccgctggaagcacagtcactgccatggctcctctaggctctggcacgcagaacaagcagaccatggttttgtgttatacagtagtcacggcagatacttcgggggcttggcaggggggacctccggggttccagaagcaacatgcaaaataacatcagttcaacaagcaggtgctggagtcctcgccccgaggccttccggaagacacccaggacgtcacacctagcccagaacagcccccctctctccatcccttctgcgatgttcactaggcattaccacatgctggtggccgctctgggtgcgggggtacatccgtgaaggaaagagatgaagctccctgcccagaggagctgacctcccagcagtcttacaggatatggttacagaggtgaatctgggggagagtccatcgttggtgttgctccactgacctccaggatggcctccagggaccccgcctcctggtggccactgtccccatcgtattagagttggccttttgaaagctgtgagtccaagttgcctggcaaatagataaggaatacaaggtgatcattcttaagacctcggggatctgcaaaccagccttctggaacctttgagcttccaggatgattcggaatttggatgcagccacagaaagcctaagcgccacaagtcccgccatgacgccctgaggcgtgggttcacacttgggtgtggctggtcacgtctataaaaatgagccttcactttgggaggcccaggcgagtggatcacaaggtcaggagatcaagaccatcctggccaacatggtgaaaccctgtctctactaaaaaatacaaaaaaattagccaggcatggcagcgtgtgcctgtagtcccagctactcagaaggctgaggcaggagacttgcttgaacccaggaggcagaggctgcagtgagccgagatcgcgccattgcactccagcccgggcgactgaagagactccatctcaaaaaaaaaaaaaaaaaaaagatgagccttttctgggaaagtggaaaagacagagaagcctcctgacagccaaggagaccagcagccagtagagcaggtgttgtaacaaggccgaggaccctcagacaccaattttgctggtaagaccgctgcccaggatgcaccgtacaagagcagcttcacctgccttcatgcagatggcacagatgtccaggaagcagctgtggtcagtgactccccaggagtcacacccagacctggggccagagccatccctgcacctctgcctgatgtgacaccagggcggggcacaggctagtcccagctcctgcagcccccgctgcacacccctacctgttagcacactgagtcctccctcattatcatcccattttacagatggagaaactgacacagggaaggctgagagaattgcccaaggtcatagaccagcacatggcagagccagtgccaactccaaagcccagatccgaaccactgagtgggcctaacctccttcccaggaacccagactgatcgcctcaggtcacccaaaggggatggaatagtgtcatcaaccagctcccaaagaagatcagagcatgtgcagtcagcactggcaagatttcagcttagagagagatcctctccagcctcaaagtaccgactttggatcaagacttctcactaaaggaaggttccggccagctcaaattttttgtactccagaatctgcaataaagagacagataatgtcttttgcagaaactggaagtaggtttccaggtacccactggacttataattcaatgtttataagtatgaccctggagattaaatcaaagcagaacttgctccctggagccctggggttaagcgctaagatgaattctgtataatgatgctgctggtagctacagcgagcatttatttatcatgcactcatggagcagctggttccatgtcacagagaagctggggttgcctggtccaggtggggtggctcttgcatatgtagcagggtggactggggcgtgcctgtcccatgatcatggcagaggttcaggggcaagtctcctgtgactgagacatctgatcaccttccggtggccaaagcaagtcacatggttgcacaggagcgcaaggctaggaattcacccctccaacgtgtgtgtgtgtgtgtgtgtatgtgcatatgtacgtgtgtctgtgcattgtgtatatgtgttatgtatgtatgtgtgtatgtgtgtgtacatatgtgtgtatgtgtgtatgtctatgtgtgtatgtgtgtaggtatgtttgtatgtgtatgtatctgtatgtgtgtaggtatgtgtgtatgtgtgtgtaggtatgtgtatatgtatgtacgtgtatggggtgtgtgtatgtgtgtttgtgtgtatgtgtgtgtgtatgtgtgtaggtatgtgtatgtttatgtgtgtttatgtgtgtatatgtgtgtatgtgtacgtgtgtgtagatatgtgtgtgtatgtgtgtaggtgtgtaggtgtgtgtgtatatgtgtgtatgtgtaagtatatgtgtgtaggtatgtgtgtgtatgtatgtgtaggtgtgtgtatgtatgtgtaggtgtgtgtatgtgaataggtatgtttgtatgtgtaggggtgtgtgtgtgtgtgtgtgttgggagaggcagcaaagtcacacagcaaaggacatggatgctgggagaagtgaggcattgggtgtcagtaactccacctcccatacccttatgccctccctatgcaaatcaggtgccagctccatcaaccagaacatgtgggtaaccataacaggttgtccccacaccaggtcaaatcagaaagtgtcttctattattttgtgtctctgtccttgactcctgggctcagtcctgacctttccttgtggtttcttggcttaagccattcatttatttccttctctcacctgggtgcactgacttcttcccatctcatgcaagcagctcaggtggctccgacagggtacagattccctttgatgctgaggttgaaggaatcagagacagtgcccccaaagctcctactcagacctcccagggcacatttgcgcccaatataatagtcatttaccattaactccaacagagaaattgtggtcccaggccccccattctgcagatgagaaaactgaggctccaagagaggccctcgccttggttggctgtgcccccgggagttttgctccatttatccatttagtctggggctgctcttccttgtgtgtccttgcctagaattatgtatgggtccaccttttccaaaaatctgccagccctggccgggtgcagtggctcacgcctgtaatcccaaccctttgggagactgaggcaggaggatggcttgagcccaggagtttgagaccagcctgggctgcagagtaaggcctcatctctattaaaaaaaaaaaaaaaatagccaggctgggtggcacacatctctgatcccagctaattgggaggctgaggtggaaggatcccttgagccccataggtcagggctgcagtgagccgtgatcatgccactgcactccagcctggggaacaaagcaagaccctgtctcaaaaaaagaaagaaagagagaggggcatggggcagcgtggagaggaaactgccagccctaaatctcatgacttaggcttgccccaggagccagagtcccataaaggggcactatgggccttccatcagtccctgaaagagtctcaccagcaatgccttcctggggctatggctttgatgacagttcaagacccccaggatccctttctgtgtttaaacaaacttggcttcctgtcctctcaccaactcttgcattcagagctcaaactggcaacatacttggcctttctagaaaaactgcagttgagaaaacacctccactgaggggtcataggggaaccgaatattcacacagccttcaagaacctcccctgtgattcctggttaatcatgaaaaaaagaaagagcagtggccggttgcggtggctcacacctgtaatcccagcactttgggaggccaaggcaggcagatcacaaggtcaagagattgagaccatcctggccaacatggtgaaaccatgtctactaaaaatacaagaattagctgggcatggtggcacgcgcctgtagtcccagctacttgggaggctgaggcaggagaatcacttgaacccaggaggcagaggttgcagtgagccaagatcatgccactgcagtccagcctggcaacagactgagactctgttaaaaaaaaaaaagagagagagagagaaagcaagcaagaaagaaagagaaagaaagaaaaggaaggaaagaaggaaggaaaaagaaaagaaaagaaagagctatgccctggcagacaccaccttaaccaaatggccagacctggtcttgccctcgatgggcaaacttgcttgttcgcccctgcctggacgcatgaaaaggaaaagacctccccaaaaaggttcagctaaattgaatcctgaagctacaatcagacaaatccaaagcaagggactgtcagcaggacagatgacctaaacgtttcaaaaaaggtcaatgtcataaaaaacaaaaatgaaaaatatggggggttgcttctagattgagagagatgagagagaaataaccaatgccatttgtgagccttgaatggatcccagatttttgtaaagctgtaggagttatttttggaataattgggaacacctaatagaggatcaggcgatattgaactaagtatcttaggtacaatgctggtgctgtggttaagacaaaattctcagatgagtgctgaggtattgaggggtggagctcaggggattgctacgcactttcaaacagttcagagaaaagtgtgtgtgtgcatgtgcgtgtgtgtgcatgtgggtgtgtgcgcatgtgtgcatgtgggtgtgcgtgtatgtgtgtgtgtgcctgtgtgcatgtgcgtgtgtgggcatgtgggtgtgcatatgtgtgtgtgcattgcatgtgtgcctgtattgtgcatgtgtgtgtgtgcgtgtgggtgtgtgtgcatatgtgtgcgtgtatgtgtgcattgcatgtgtgcctgtatgtgtgcatgtctgtgcatgtggatgtggtgtgcgtgtgtgtgcctgtgcatatgtaggtgtgtgcctgtgcatgtatgcatgtgtatgtgtgtacatatgtgtgtggagagaggaaaaggggaagagaggagcgggaatgcatacaagtgagacaagaggtaaacaattggtgtatgattgcgatcaagagtatatgggtatttattgctattctaattatttccacttttatgaggtttgaaagttttcaaagtagtgagttggtaggaagaaagaaaatgcccaaagagggagcctaccgaccttcctgggtcccctgtccttgtcagccaaccacgtaaagggaaagagctaggatttaatgaccggattccttcctgggctccaagcattttcacatcttgcttctcattgctccgtgagaagttgggcaggcctttctaaatgctccatgcttcagtttctccaaatctaaatccggaagatttgctccaggtcacacgcagaccaagtggaagtggagctgatgggagggacctagcctgtgggctccctgcttggaccctgggccctgcaccccgtcagctgctaggctcccctcttgggtctggtgtgttggtttctgaagcctgttctcccaagtcccggaggtgtcagggatcccagggccacccagcttagctgtgcctgcctccctctgcgctaaaggagccactgtgccagcctggaactcacggcatcccctttaggatgttggctccacagggattggctccttggcagatgcagtcgctcctgattggacagtggtgtctgcagctcgacaaggtggactctgggccagtcggctctgcctgtgtgtcttgcgtcctgaaatgcaaagcaggggctgtggggaaatctcaccaacccctcctcccctgggaggtggcaaaggtggtggactgggctgctgggaccctggggaggaatgaaacagaggctgtgttgatggcctgcagttccttgtaatgtggtcatcaaacggtgtacagttcccgtctgtggctgcaggctggagagctgactgctggcacagatacagcctgacctcgggtcaacacttctcggagtccagaggggttgggagtgggacaggtggcctcccagggacgcctccctgagtggccagtggtgccgcttgtccctgcacctgtagctgccctgagcacccccactggacacagtgggcattgcaccctccggagaaagctgcccttgttccacgtgcgagccctgtccccagcgccatgggctgtgctacctgcagtaacgcagactgcgagccccggctgcctctccagtgctctctctcctctggccttcagcaggctgggtcacagaggtatccatccactcattcattcactcaacaaatatctgttccatgtctactaggtgccaggcacagctgggaaccagcagacaaaactccctgctttcccggagccggcatcttggtgggcagacagcataagcgagacgagtaggtggaggagaaggcgtgtgagcaggtgacaggcgctggggagaaacagcccaggggagggaccagggagtgtgggggagacggggactgcgatgaaagggaggcgtccagggaagacctccatgagaaggtgaccttggcataaagaggcaaacgtgggagcatgctcaggcagaccacggtggtcagaagttgaattcgggccggaggaggaggagtgcatgaagccctgaggtgggagtgagtctgtctgctgggttcacagacccccagggagccagtgtggcaggggccagtgtgtgaggggctcagcgggggatgtggctagaaaggttgtggacccactgttgagattggactttggctctgaatggaatggaagccattggaaggtttggagtgaagcagtgacataatctgacttatgttctgggaggatcaccctggccgcgtagagtctgccggcgggggtggaggtgggcgcagggaatgctgtgaggagcagcatgagagccggtggcagctgggcaggagaggagacagggagaggcacggggcccctggcccagggatggattggatgtgggaggcgggacgtgggaggaagggaggagtcggggtgactcccgggagtgggactgacacctgggagggtggggagctcgttactcatctggggccaccctgggaagaactgggctgggggtgagggcagtcgggagctcagtgtctgacccaggaatccgaggcacacgttccccaccctcatagctgagccacacaggcaggaaataaacagctctggggttcaggggagtggtagagggggtggggtctgcagcatggggacggggttcagagccacgagatgggtggaaatctgaggggctttgtggggatggaaaagaatatattcaagagctgagcaagggcagccactggaggacagcgatgagcaggaagaagcccaggagactgagaaggagtggctggagggatgagaggggagcgtggagtcctgggagctggggaagccgcaggcagcacctctgtcaccccgatacgatgggcaccgctggacctagcaacgaagaggtcaccgcaaccttggcaagtgcagtttccacggagtggtgagggcagaggctgattggagttggtttataagccggaagaagaagaggaatcgcagataagtgaaggaaaactttttgaggaattttctcaaatggaaggcaagaaacagtggagaagaaagtgggtctaagaaactgcttttttaggccgagtgaggtggctcacatctgtaatcccagcatttagggaggccgaggcgggcggatcacttgaggccgggagttggagaccagcctggccaacatggtgaaactccgtctctactaaaaatacaaaacttagccaggcatggtggtgcacgtctgtaatcccagctatttgggaggctggggcatgagaatcgcttgaacccaggaggcggaggttgcagtgagctgagattgtgccactgtactccagcctgggtgacagagtgagactctgtctcaaaaaaagaaaaaagaaactgtgttttttgttttctttggagatgagagaaataataacttattgggtgcagctggcagtgcgtcctgaagaaggaggaatgggcttgggatgcccttgagtgggtgtggggctggggacagccatgtgaccatggacactgtggggccggttcactgggtagccacaggagggaaggcaggtggctttgagcacagatcgtgtcgctgtgtgtggaaggtggcttctgattgcttgtgttttctcaggggtctgggaagcagcagtggcagctgagggtggggtgggaagggaggagcagcgaggtgtcccctgaacctgggagagaggatgccgtagagcaggtgcccatagactctttctgtaaaggaccagatagtaaataatttaggctttgccagccagccagtctctgttgcagctcctcagccctgcccttggagcccagaagcagcctgagaggattcgtaaacaggcatggaggtgttctaatgaaactttatttacaaaaataggcagcaggctggctctggcctgcttagactcctggccctcaacctcgcctctaggccaggggtcttcaaagcatggtccctgggcctgcagcatcagcgttacctggaacttgtgggaaatgcagattcttggacccccaccctatgttcatggagccagtgactcagtccctgcactgttttccaacccaagttgagtttgtgattccggaattctggaagttagctcagcacctagacccaagagagagtgaagtgtggggtgggctacatgccctgttaaaggcacaggcatcccagcccccatccccttctgcaaggctgtgtgaggacatcctgcctcccgtgggccgtgtttgcttatgcagcatccatgggagggctccctggggacgggctgtggtgatgactctgctctcagcagaaccctccactctgaagccctggtttcctgtccacgtccctcagctactcaggggagcctgggggcaggaactccattgcttgtaggggagcctcccacagcagcagggctcagccagtgttccatgcaagaagaaatgcactgtcctccgatcgaaagcacagcatctttaggagtttaacgacagttttttaacgactttagtgagatgatttgatttcctgcctctgagtcatctaagagcaaaatgcgtgagctgctaatgggctcaaagagaggctgcctttgaggcccctccagccccccagtgctgcagggattcaatcaccccaaagccaggtaaccagccttggcctcccaaagttctgggattacaggcatgatccatcgtgcctggcctgaatgagggtcttttttttttttttttttttgaggcggggtctcgctctgtcacccaggctggagtgcagtggcgcgaactcggctcactgcaagctccgtctcccgggttcacgccattctcctgcctcaccctcccaagtagctgggactacaggcgcccgccatcacacccagctaattttttttgtattttttagtagagacggggtttcactgtgttagccaggatggtctcgatctcctgacctcgtgatccacccacctcagcctcccaaagttctgggattacaggtgtgatccaccatgcctggcccaaatgagggtctttaagaataaaactccaggggatcgtcaccaagccccaccacttcctctgaggttagcatagtgctggatcttctctgcatcttctgtccttgtttttggttttcattttggtttacttgaaacaggatcttgctccatcacccaggctggagtgcagtgacacgatcatagcactctgcagcctcaatctcccaggctcaagcaatcctcccacctcagcctcccgagtagctgggattacagacatgcatcaccacgcccagctaatttttttattttttaatttttttgtagagactgggtctctacaaaacaaatgtctctgtgttgcccaggctggtctcaaactcctgtgctcaagcaatcctcctgcctcggcctcccgaagtgctggtattccaggctggtcccattttaccagcaggtctacacatgtgctcacatcgctcactcagaggagacctccgttattagggggacctagacctgtgctgccttgaccccagggacagaggttgtttgggaatcccctcccttactttgatttcttccgaggaagccggcttcctggtgacgggaggtcactgttctggggaaaaagagtgggaaaaacaaagccaatcagccacttggctaagtgtcaggtttcccaacaacttcatgggttgctgtggatgggcggggctgttttgagcccagaccatccctttgcctgtgggtgtgggaccacgtgattttggatcaggggtcatttgtccttccagaagccaagccctgttccaggcatgggggtgcagcagtgagtgagacccacagaaccactgccctcctggaacacaccccccccagagagggaactggggcaccacagacccgtgtgcaggcagcaagggcgtggtgtcggccggggagcagcagggacccctgagccccacagtcggggctcatggcgctgagaagcactgcagcaagggcgcagccagtaggagaggagccgcaagcgcaagcatccgcagacagtgtgagctcagcgtgctgggaaggcgggggcctgggtcaagggccaggcggcagagcataggggcctgagggggcagtgcctaggagtgggaggaaagagcatgggaccagattcactttggaaatagaagcccccaaccagcagccagccaggtggaggaaggcgtgcagagctgagagggttcaggaggcggtggggggagccactgggaggggacccaggggttcaggtgaaagacagcagtggctcagcccaagggtggcagccagagatgtgggtggacggctggatattggcagccatactcattatcaatgctgctgtaacagctcatcacaaaccctgcagcttccaactgcccagagtgagatctcctggttcttgtgggtcaggcattggggcagagcagggctgggtctgctgttttgggacccctgagctgcagtcgaggttcttgccgggactgggctcaccttggaaacctctggtaggaaaggatccacttccaggctccctcgttcgtttgaaggactcctttctttgggctgttgggctgagggctcagcttctcgccagctgtcggcccgaggctgccctcagttcctgccccaagggcctctccaacaccacagcttgcttcatcagagccaggagggacagtctctagcaagacagaagtgacagtcttgccattacctttgccgtgttctgctggttagaagcgacttgctaggtgcagcccacactccaggacaggggctgcccaagggcaggaatcccaggagctgcggacatcagtggcatctgagaagctgcctgacttaggagctcaatggcagcaccaggaagctgcactgggctggagtcagggcaagggacagtgtcagcgatgaccctgggggacagcagtgcagtcaggagctcagaaagtacacagatgccccctgggcggtctcttctgcaccatgtgggcagcagaaactacacctacggtttcagaacaacagttggggtggtgtggaaggacctccacgacatataaggtgggagtgtggagtgatggagtgtggaaacccttctcacagttgtcacctgctctccagcccctcctgagcccgtggacctgcctgcctgccgtgtgtctgtctgtcgtctgtctgtctgtctctctgctgaggggctccccgatgccctgaacccagacagcctcctcagcctttgtgatcccagagtctcccggccaaacctggttgatcttttttaaccaccaccctcttcccctcccttattttgcttttcttccagaattttcccactgtaaaaaaccgagcaagtctggataagtgaggctggctccatgtatccagaatcaacgacgggctccccggctcggctctcgctgcggcagacgggctcccccgggatgatctacaggtgaccccctgccccctcacccaggccccctcccagggtcagtcctgcttcgaggacgggttcccaaggccactgtcctcccctctggaggtggaagggcccaagcagggcccacaggcttctgccttccacggggttttgaggtgcacgctggtgagcgttttctccaagaaaggagcaggggctttaaaaacccaagtgggaaagaaaaaccaaaacttttccagggcgtttgagccagagtagactcctttcttgtccctgacccttccgaaatatctcgtttgaggttaacagagcggccggacagtgagtgcacggccaaccccggcatcctgttcctcccactttatacatcgcagcccctgtggccctgccagtttctcctgagcgaggatgacgaccttgcaggcctttggggaaccacgtctgccggtttcccaacactggagggagtgggggcggccaaatgctcctggggcatcctgaccccctccttgtggaactcacttccgcttgcagccctgggtgtttctgtctgcaccataaacagcgctgaacatcagcgacagctgcggagggcgttcagtgagagctgagcctctggggacagagcatagaacccacgaaagacgcaggcacaggcagtaccccagcagcccatcagtcttgggaagccagacctttccggataatcactggggcctgagccagagcccgtgtctgtgacagccacagggaaaggcagtgtctgtcctaagaagagccaggcgggcaggtgcgggtttgccagcacgcgggtgctctgcacgtctgggttggagggttttcagccattgcccacaagcatattgcaaagcaagtcctgaagcacattcaatccaaaccaaccctcactcggaggttcaccacggaaaacagggcctggcatggaaggagcccttggtgtccaggaaactggctccgggtctctgccccgtggccaccgggtggcgctgctgcagagcacttggcaccggctgcgcttcctcagagactgccctgagcaggcgactggtgggggcccgggggcatgggacattggtggttctttctgacctgcacctgctggggttgatgccaactgtggactctctctcttctctccctttctcctttttctcttttctccattgctgtccgaagtactcggtatgggagtcccaaaagacagctccagttttacaggtaatgagtcttcattctccctaaaacccagcgagccgaaggccagggagcgggtgggaggactgcacccttgccgagcagggtgtgctggtgtattctctgaagccaaagcccccgagacccccaggctctgctcatcaccctctgtgcctacccacaggatgctgtgcaatgtcctgatggaaaatgtgaagtcaggttaattgtatgtgttggtctgccagaagtttgctttgatttgagcaaatgggcttttgatgactgccaagctctcagccaaatctaccgttaaagcttcactcatcaggcagtgagggagatgtcttcctgtggtcaccagcttgccctgcttccattatcagagtacaggacgtggcgagcccatccgttccccctttgcctgtgggtttgacctgatctggaactcacagagctcctcaggctcattgaaggttaatgcctgcttgggggtgtgcagtactgatacgacgtggatcagtgacatctttctgatatgtttttctgttggtgaattaacaaaccgggcacctggcgagagactgtgccccagcaggatgtgacatcaagatgccaggcttagggccctgcagggtgctcttggggagacccgttcctctctctgggctgcctctccctcacctgtaaggcaggggatgcatgttcttggtgcagcctccaaccctaggaagtaaaatgtcagggctgcctggagcccatgggcagcagcctccccatgccttgggactgtttggggaattggcacggcttctggcagcaggtccctggtatgcattgctgcatcttggcggtcaggccgggaggtctctctattcggacccggacatctggtaacagtgctttggggatcgttgccaatgtgccaggcagtggtcatggaggtggcaatgtatttccatgtagcttttctctccccgcgcccccactccccacccccccccccgtttgccagccatagcacctctgatggggaccgtggacctagatgctcagagtgatctgtgccacgccttcagtgcctcctcggaggtcctgctccttacagggagctctgaagacatggccaactcttagatcctactgaaattttggtagataagattttgcttaagatagttaaatctgaactccggcttgcaaatgctttccctggatgaaatgtttgtattgtgatgtatgtacacatggtataacagatcctaacaaacatatgccgctcatcccaggggatttcatcagtgaaacaaaacatgtacctgaactgcatcctcagagagccgggagcagcctcagtcctcagaagggaaggggtgaggtctgatgagcaggcaggaaaatcccaggtgcagacctgccagctcaaaagggctgcccacaggtacagaccatccagctccaagggcctgcccctaggaggggccaagtaaattatccagtgaccaagtgagagccttccagcccactcaaggccctcaaaaccccacaggctcaacatgttgtcccccccgccgggatccctgtgcttaagaaccttcatttccaggtggccttcctggccccaagggaagctctgaagcttaccctctaggctctcagccccaattctggtgcccacaggctctggccatcctacccgttggatctccagggggtcacttgggtgtctcttgtgggggctctggagatgacctctaagggctagggtctttgtttgttaacaggctgggggccactcctagtagggcaccctcatcacaccaagcataccactaaacatggctattggatggttctttcagttacttaggcctggccctctcacagggcagaggcgttcaaggcatgtgccctgcccccatgcagctcccaggcaaggaattggcataggacactgtgccaatcagctgtccaccaagtgctgcataacaaacaactccaaaactcagtgccacgcagcaatcagcatctcttccttgctcccgtgtctgcgggttgaccaggcagctcgtctaagctggcttggctgggtttgtctccaagctgcaagttggatccccatgtcctccatcttcccatgcttaactggggcctaccccaggcatgtccttcccatggcaaaagtaccagaggaaaagcagaaacatgcagggtctcttacggcctatggttggggtcagagcgctgtcacctctgctcacgtgcttttggccaaagtaagtctcaggaaccagcccacagtcaaggggctggaaatatattgcccccaccagtgggaggagctataaagtcacatggcaaagggcatgggtacagagaggggtgaaggattgggagcaatacttccatgtaccccaggtctcaaatagccctgatgatctccagaaggcagagcacgtcacaggagaagcccaaagagcatttggggtccaaggaaggaggggccacagccagctgagagccaagaagacttcacggagaaggcagcaggggcttggatctggtccttgaaggctgggcaggattcaacgcagaggctgggaagcatattccagtagatacaacagcctgagccacagctcagaggtgtgcacagagaacaggaagtgacagttacccagcctgggccatcagggacatgatggagaataaagagaggctggctgtagaggtggatgttggtggggggcctcgaatgcctagcgatggggcacagatgcactcagagggcactggggagccatctatggtgtttgagcagggcaggggtcagagatctgctctaggaaggaagcctggtagcagggagtaagacagggaagagagaggctaatgcaaggagaccagacagtgcccaggaaaggtgcaggacggctgagctccaggaactgcacagagagagaatgaaggggtgcagggcctgaaaaaaggacgtcagaagccacgtccacagggcttggccactgatgggcaggtgctgagacagaaagggacagagaggagcagtggacccagggaaggagagggcctcattcggagcatgttaggctgcagctaccacccagtagtgaggcgcaggccccccgaccagggcgacatgtggggatctgacagagtgggcttgggcctttggggacaaaccatttcaattgccaaggccttcgcagctagtcacccgcagccaggcacctccagactctacgtgctctcccagcctcccacttcatttaccttccacactgcgactggggcactgatttcctgtcccccaccttcccccatggcagctaccactgtttgctcattcatcatggggggacggttctgcctccattcaaaatcccacattcactggcgcgctttctcagccggaagatgatgtcacgctgggactttgctggcatcctgtgacacgcagtgaccctgggggtcatgaccctggggttggggctcagcacttagcctcatcccagagctcagccttgtttggcctagtctcaaagcatttcccaaaccccaggtcaggacatgtgccgtggagaagggctcctgtgtccctgcctggagtgagtggcagtgtggagtccaaatagcaggttctggggccttcctgccatttatagctaccggtagtatcagatatacccatctcgggtgtatccccagaggacaggaggagcatgcgcgtgtgctgagcagaggcctctccagacccccttggctgtgggtggtggccccatacgacggggcccccagctcccctgctgcagacacagttcagagttgagtggtatgcggaagccacaggctctgtgtcccgcactcagataccaaagagcaaggcctgcccctttcgacctgtgggtccaaaggtttgtgtttctggcacgcggggatggtggaggcagcaagggtaggcctgagggacgggcaggacctccccctcaccttgggctgcaccccaaccccacgcaccgggagtcagccttgccaggttgcagcacggaactgcacttcccgagcttttaggggaagaggcactcgtgaataattcagcctctttcactgagatgaaaacgccctaatagaactaatggactcgctgcctcaaaactcgactctggtgggactcatctcattcaccaattgcttctgacgtcctgcagtgacactccctaatgaaaaagccgctgtgccagatccttagagtgtctggtgatccctaataaaccagactgtggcctttttaacgagcagacgcccccacgaaggcaggtgagtcctcccttcagccgctaccttcctagtggagatgccgcttgggggcacgcatccgcgggaatgaaaaataacagaggagaccatattttggggtggttttgtctgatccggaattagaccctccgtgtttttgcaaagcagaagaccttaaaaaagagccagcctgaggtaaacttggaatgaccgtgatggatggggtggtgggcggcaggtttcagccgggcagcacctctcgcttgagtctgctcacagcccagacctgcccaaggctgactgttttcccatctgccggagacacgggcgtctagctcgtacctcgctgtgttcaccattgattaagattcagcattttccagttttgcccagagcgctgtcagggaggtttggtcttgtctgaaatgtctgtgcaggaagcacgtgctgagggagccaggggctgcttgtttgggcctcagtttgctgattgtccttgagcgaaaatcattctgtgtttgcactgaagcaatgccgtgtcttgtagagccgcaccccggaatggtagcagctccccttccatttccgctttggagaactctggctgggctctctgctctctggacaggtgtcaccattcagaagagatgctcagggttccttctcaatctcaggttgtatgctttgttggctttcagtaaacagaacaattcagaaattccaggtagaggagtctggggtgaggtagtgattcctactgacttaatgaggttaacatcttccttgcatttttccatgtcacggtgttaattcacgtgaattcccctgggcccctgatctacaggaatagatttgcaccaggcaggcccagcccaggaaagaacttgtgggttccacgtaattagcaatggctattgaggaggggctcgtttttcttggtaccagggtggtgagggagtgtcagggctcagagaccctcactctggaaagcggccgggatttgggatattttgaattggaagtcaggggtcactgtgctcttgagcacaggagaagtggggaccctgaggcaggagcccggcagtggggccactctctcctccctgcagtgtcttaccggggggcccttcgtccaaggacctgacgctgctagagtctcggcaaaagcccagaatagagccccagtgtgagggagtccagaggtgtcctctgtccccaggcaccgctggtaacgggcagagcctctttgccttctgcctgtacctatccttcttcccctggggcagccctcccagagtcatgagccttcaggaccacagggagcccccgctgtacagagtcctggcatgggagtcccccccacacaagagagggtgacctgcaaagagctgctgggtctgaggtaggaagccagccccgcccccaccaacagctgcctggcactgccaggaaatgcccaggtatagccctggttggccttttggagcctgggccttggttactgttctacaaatatctgagcccctcctctgtgcacgggacactcccgtgggcactggtcagggggcagtggcagcaggcagaagagtccttgccctcctggacccaaccttcaggggagtccagcggccatgggctcctcatggcaccagccctgctcctcaccccaccaccccatgccaaaggctgccatttctgtgcccgcaagttccctggcccaagccctgccctggcaccatggggacaagctcgtagcaagaggctctgggctccctccgtgccgcagggctcccacctgcaggtctgctcccagggctgcaacatgagctctaaggaaagattgcaagcgggcccccacagggagggacgccctctaaatcctggccacaaaacccattctgtcctgccctctctcccctctcccactcacatccccaaactcagccttccaccatcttgttgtgaagggggcgattattcacatctgtgttctcttcccttaagcattttctagggagatttggtgtctgtgtggctcactcctctcactcaaacctgtggtcacaagttccttcccgccctgcctgctggcccctggtggtggatttttctttccacagcatttatcataattggtgtcttatcccacgccccccaacagactgtcttctggctgcgtcaccaactcccacccagttgtccaaagcctcatctcatgcagcccacagcagcctggtacaacaggcctctgcccagcctacctcacagatgtggaggctgaggccgggagcggtcaaggtgcctgcctgggccacaccatgagcaggtgacaagcagagctgcccctgtccagaagctgggcactcagccaccccgtcctccagccccggggccttggctatatttctagagccaaaccagacccggattgctttttgtgagtaatgtcttgaaagctaatggctattgatctcagcctggtcgggccaggcagggaacttgcgtgtctgaggctggtcctgcctttcagaaagagccctggggctacagcctgcccagctggccttctttctaaacacagacctcagggaagtgagggttggcccccatttgccccacaccggactggcagctagccacatggccacctcagaagcagctgcctgccacgcgcatggagggaagggagtggccggccagtaggcagggaagggaagctggtgctgctgtctgtgggtgccaagggcctcatttcctaaggtgaacctctcctggagtccgggcctctctgccctccagagcgattctcctggaaggcagacggctttccatgccagggtacccgcctgctttagcgtccagaggtccagcagccaccacccctcccagcatagaaatgagcagtggtgaatgcaactcctggcatgggaaccccccagcaagagaggacgacctgcaaagagccactgggcctgaggcaggaagccagccccgcccccaccaacagctgcctggcactgccaggaaatgcccaggtatagccctggttggccttttggagcctgggccttggttgctgttctacaagtatctgagtccctcctctgtacacgaggggcactcccatgggcactgagcagggggcagtggcagtggcaggaggcagaagggtccctgccctcctggactcaaccttcaggggagtgaattcagcacacaggacagctagaaaggaatcagcaaggtggatgatggcgagcgccatggagacagatcacagcaggaaagaggcacatggtgtggtttgtgtgggacagagggtaggatgggaaacgcagcccccccacccccgggagccatgcccatcagacagaggtgcagaggtgcagacagcacagcaggctccccaaggacgactggttgctcgcctttagggagggggccatccagccctgaccagggtggtggggccaaggcctgtgtggacactgctacccagctccctgtaggggctcctcgggggctccttgcctgctggtctctctttagctcttctctgagcccaccttccctacctcaattgcatgttcatgcaacaggcatttgtaggctctgctctgagctaggcctcatgctgggcacaacagggcagacatgaatgaaggtccctgcaaataagatacagacgaatacttgcagggaaacccccatgaaagaggcagctgtggggctcctggaggtggcccccctctctgggtgcacatataggcagagcagtgaaaggtcagcaggctggtcacccattctggaaggaccccagcacatggggctcatcacaaactcctgccccttgtgggtctttcctttggcccctggagctcaccccaggaaaggcccagcctggggcaactccaggacatctcaacccccttcaaggaccgtgctaaagcctctgtagctgcctcagctcccaggatagccctcccagctccttcccagggataatcgaacttttcctctcttggggcagaaggtggggacagtgctggttcctttccagctcccaggccaggttccaggatcccactgtgcagctgacccagctgaaatggtgacttcccctctgcaccttctctctctggtgatgatgcagagctgcagtgcaggccacctgggccatggccgaggctgcagtcaggtggggtgagggtcactggactggggacctcctttgtgttgagcctgcctccatgtcctcattgcgctgtcacagactctgcagggtgaggactcagccccgaggctgccctcactggtccactcactgttgtgcacatgaattaacaccagtggttgcgttctggacacacgctttctcccttggccttttaattgtccactatctctcagggctcactcactcactatgttgagatgcctcattcttgacagcagcacaaattcccactatgtggatggactgtcacttaggtaaccagtttccctactgatggacatttacattgcttttagtttccaagaatgtgcattcatcatttcagctatatttcagtggttcttcacatagaaactttgaaactcccctgtcccaactaagcctatttccccaggccactctcctccgcaacctgcttaaatgcattctgctcagtttttcttttgcaaaaagcatgaagcccaaagatctctgcggtgcaatgatgcgttcaacaagcagggaatgtgttgtatagatagcatttccctttacaaggctaagagcaaataggaccttcccatgttggggccacctggcatgcgggggtgaggtgcctccctggcataattacaggagagtttacttcagcaacaggtgtgccctgcgctgctttcccagggacagcttttgacccagttttaccctgggaaccacctcaagagaccaccatgacatggtaccgcagtcaccacggaacagcaaccctggtcttcagcatttggggggctcaggctctgcatgctctctgtgctcccgttttcatttggacacttggggtgcagctgtcctgcctggaatgcagctttgcctgtgcttgtctcacagatgcaggggacagaaaagggcagcttagccagagttcctggcaagcactgctttgcggactgagaatctcatgccaagaggtgtttacatccaggggccgggtcccactcctagacaccaagacctggtggtggcactagttaaaggatgtttcgctgcagctgccccctgccccagggccagccatccagcctggggcacgtggggcattggcacactgtctaactcatcaccgtctggacagtggcagctcccaagccaggcggcaccatgctgtccatgacgtacagcgagagtctgcggagcgtgagcagcaggtgccactctgaatgggccctgcaccccgtccgccagacggacacgctggaactgcagcggctgcgggaggtgcgggcggctgcccaggccaggaacatggagagcttcctccgcatgcacggcctttccctggacggctgcaccgcccagcgcacaggcatgaagtatcggtaagggccgggcaggggggcggtggggtgggaagtctgatttcagccatataaatatgtataaaagggctgggcacggtggttcacacctgtaatcccagcacttggggaggcagaggcgggtggatcacctgagatcaggagctcgagaccagcctggccaacctggtgaaacaccacctactaaaaatacaaaaaatagccaggcatagtggggcgcacctgtagtcccaactactcaggaggctgaggcagaagaattgcttgaactcaggaggcagagattgcagtgatccaagatcataccactgcactccagcctgggcgacaagagtgagacactgtctcaacaacaacaacaaaaatgtataaaggaagaaaatgaggccaggcacggtggctcatgcctgtaataccagcactttgggaggccgaggtgggtggattgcttgagcccagaagtctgagaccagcctaggcaacatggcaaaaccccatctctaccccaaaatacaaagaaattaggtaggcatggtgccatgcacctgtagtcccagctacttgggaggctgaggtgggaggattacctgagcccaaagaatctgatgctgcagtgagccgtgatcgcaccactgcactccaggctgggtgacagagcgagactccattgcgcaaaaaaaaaaaaaaagtttagtaaattctccatggggtaaaaatgtgtgggtgtgtttctccatggggaaaaatgtgtttctgggtgttggagacccctgctcttaatgataggcacgtaggtctgaattttcttggaacctccaaaggacattctttttagtgcgcttgtctttgaattcagcacctcggacagcgctctgctagccaccgttctctggctggtgtaaatccctctcaattgcaaattgacagctttatcttctgtgcctctcaggaacatgcccttgtgagagccattcagccaaagaggaccctccccacccagtccttgtagagttgccagttaaatttgaagttcagataaacgcgtaactttttagcataaatacgttccatgcaatatttgggtcatacttatactaaaaagttcctcattgtttatctgaacttcaaatttaactgggcgtcctgtgttttatctggcaacactaaatatctggcttccgtctgagacagaccctagggatcatctgcgtgctctgtgcagagtggagtgcaggccaggaccgctcctttaacgttttctcctgtggacggcgtgtttggtccttcagcccattgtttgaatatgtggttgtaatttagaaacaaaacacttctcctgtgagtccattagatggcagtgtttttcaggctttgtatcctaaatccagctgtaaaggaaggacaaagggtccgctagtttggccacagctgacctccttgttctgctggaaatttctcaagaaggagacgctgggcattcatgaggggctggtcattgattccttttgtttattcagtaaatgtttattgagagtctgcttggcaccaggcgctgagccagatcctggagctgctgcatgaacaagagcaaccaggtccccaacctcacggcagccatggcctgggggtgtggggggcagagaagcagcgagcttgcacggagacaagttccaacagcgaccactggccgaggcagcaaagcaggacaatgcaatgaagaaagaccagggaggccgagggggaaccctctgagagagggatcatctgaagatgtggagaacattccagcccaagaggagaggggtctggaatggatgcctctctcagctggaggagcgaagagaaggcccaggcggctaggctggagggaggaaggtggaggacacaaggcgatgatgcaggaggggccagaccccatcctccaaactcagggaaacctcagctctctcctatgtggacaggatttgtgatggaggatagtttagtgggttaaatcaagaccccccaaaattcacattcatcctaaacctcagaatatgacgttaggctgggtgtggtggctcacgcccgtagtctcagcactttaggaggcagcctgggtaacatggcgaaaccccatctctaaatacaatcaaaaaattagccaggcatggtgacacatgcctgtggtcccagctacacaggcggctgatgcaggaggatcacttgaacccaggatttcaacgctgcagtgagccctatttgtgccactgcactccagcctgggcggcagagtgagaccctgtcttaaaaaaaaaaaaaaaagaagaagaagaagaatgtgacattatttggaaatagggtcattgcagatatcattaagatggggcaatggggccatacaagactagaatggaccctaattcctacgactggtgtccttataagaaggccatgtggtgatagagagtggagtgacgggtccacaacccaagggactctgaggagtctcggtgttaccggtggagggtgtgcagccaggttcctggcatcttgaacaaagaattggacaaaacgcacatacaaagcaaggaaagaatgaagcaacaaaagcagccgggtgaggtggctcacgcctgtaatcccaacagtttgggaggccaagacgggtgggttacatgaggccaggagttcgagagcagcctgggcaacatggcaaaagcctgtctctactaaaaatacaaaaattaaccagtcgtggtggcgggcacctgtagtcccagctattcgggaggctgaggcaggagaatcacttgaacctgggaggcggaggttgcagtgagccaagatggaacaaaagtacactccacaggatgggagtgggcaagcggctcaagaacctggatacagaattttctggggtttaaataccttctagaggtttcccattggttacctggtgtacatcttatgtaaatgaagtagtggcctgtgatcattctgattggttgcagaaagtgaccaattagaggctgaaatgaagttacaaagttacacttctatgcaaatgaagacttggcccacagccagcctgattggttgcgggaggggacaaatcagaggtattttccatttttcgtctgccacacagaaaagggggcgccatgcaaagagagtagcctctggttcttttgttacttgggcgtggaaagttggggttttccttttgacttagttataggaaatcagcgggaattggccttcagttccctgcctccagaccctggtctcctgccccaacaggagccacgagatgctggaagggacaggaaaggacacctcatgagggtgtttggagggaacactgcccacacctggacttcagactccagaagtgggagagaagacattcctgttgttgtaagtcctctaatttggggatctttgtaatggcagccgcagggaactaacacaggtggagagaacatatcttttatttgcctgaagccccgaggaaaatgcctgagcagcctcggagacactgcaggtcccactgtggggctgaaacgcccttggggatctcgcttctcagggagtggaggagaccagaagacaaacgcttttttttttttttttttttgagttggagtttcgctgtatcgcccaggctacagtgcagtggcacagtctcggctcactacaacctctgcctcccaggttcaagcgattctcctgcctcagcctcccaagtagctgggactgcagggatgcaccaccatgcctgactaatttttgtatttttggtagagacagagttttgtcatgttgaccacgctggtctcaaactcctgacctcaggtgatctgcccaccttggcatcccaaagtgctgggattacaggcatgagccatctcaccccaccaacaaagtccctttagcagttgatgggccagaggttgttgttacacccaggtcagggtgaaggtggggcggggagggtggtggcctcactctatctggtgaatttcattttgctgcaccagggttgacggggtgggtgggatgctccgtgactcagaccaccagttattaaagatcccagataaatttattctgtgcttacctcttctccgtcagcgactgggctgggtcaccattaaacttggtcttaaatatgaatatagaaaagatgatacctggggataggcactgcccggtgccgcaagaaaccagctgtgcccctggcctgggcatttcatcagctgaactgagctgtagctgatggaggtggacggcagcatgcctgttacacttccccagtttttttttgagacagagtctcactctgtcacccaggctggagtgcagtggtgcaatctcagctcactgcaacctctgcctcctgggttcaagcgattctcctgcctcagcctcccgagtagctgggactacaggcgcgagccaccatgcccggctattttttgtatttttagtagaaacggggtttcaccacgttggccaggctgatctcaaactcctgacctcaagtgacccactcgcctcggcctcccaaagtgctgggattacaggcgtgagccaccgcgcccggcctacacttccccattgtttaaactgtcctcaattattgctgttaaaaagaattttaagatgaatttttaaatccacacagcccctgtgtaagcatgagggagcagggtgagggcagctggcctagcacacacttcccctcccctgtggacgttagggttcagagatgtggcctcagaatggcaggccagaagctgtggccgggcccacactgtgctgactggacaccagccctcagttcagctgtgttttcctctgctccccatggtgctgggagtgaacccaaactccccgcaaggctctacgtggccctagcctgcctccttggtttcaactcggacccctctccctcccgctcaggaggctctggacgccgccccttccttctgtatccccaaaggggaactcattccatccacagggtcatcgcactttctgttccctcttcctggaggctgcctccccagacgtggcctggttccttcccattgtcacatctaagcttggtccccaaagagactgtcccaagcacccactctaaacaagcacctatgaagtcatcagaagcccctctcctgagtgagtgtcttcctcacccctcctccatctcggttgccttgctctttgcccatctgcactgctttgagatcagagctttgtctgtccctggcacccggaacacccccagcctctgtgagtttaggtcggaaggcgctgcgtggtcttggtcttaatctactttccaaagcacatgtctcgttcgggctgcatcctagatggtgggaagacaggactgactggaagctggtctgaggctctctctgcagtccagatgtggatggcagggagcctctgcggtccttgggcactgacccttggtcatgaactcctggcagggcaggagtcctgatttcctgtgctttctgactctagatcccaggctcttaccacaagctcaggttcaccaggaagtacttggttggttgccaggttcattgagcagactgtagttgctcagttaaccataggccatcacttccagctgggaagagctgggaatccaggtgtgtcttaaaggacaggcgggaaggagggcactgagggcaggaggaggggaaggagaaaaacagcagagaccaggggggatggcaagttaacctgtctacaaggccaagtgcatcctgggaaagaggggtccccaaggaacggggtccatcttgggaaagatcctgttttactttcctgaggctgctgtaacaagctgggtggtttacaacagaagctttttctttcccagttctgggaggtgaaagtccaacggccaggtgcagccgggccatacttcctccgaaggccccagggagggtcctttttgcctcccccagtttctggtggtgccggcaggcctgggcattcctcagcttgtggccacatcgctccaacctctgcctctgccgtcccatggccattttctctctgtgggcctctgtctccaaatctctctctccttataagaacaccagtcatggccaggcacagtggctcatgcttataatcccagcatcttgggaggctgaggcaagtggatcacttgagtccaggggttcaagaccagcctgagcaatgtggcaaaactctgtctctacaaaaaatgcaaaaaatggccaggcatggtggcaagtgcctatgatcccagctattcctgaggctgaagtgaggatcactgagcccaggaggcagagtctgcagtgagccgagatcgaaccactggcactccagcctgggtgacagaacaagaccctgcctcaaaaacaaaaagcaaaaaacaaaaacccagtcattggattgaaggctgaccctaatccaggaccatcgcatcttaacttgattacatttgcaaagaccttgtttccaaataaagtcacactcacaggtatcaggaattaggatctcaactgtcttttggggacacatttcgacctgccacaggccccaaggattgactcaacaccttgagcctgcggggacatccctgagtgtcctgggaggaacccgggctcccaccggctacctgtgtgacctcagacaagtcccctggcctctccatgactcgatttccttacccggaaagtggagaccggggtcactacagcagaattgtcctgaggactaaataagctccaggtgacataactcaaagctccaggcttggctcattgtgggagagaaatgcaggcccttcccgtccctggaaaagggaccttcccacacagcagtcgctgtccaggcacctggactgtcccctgtctatccatcttggggtctcactcgtgcacctagtctcacttagagatgtagttcagtgccgcgcagacaaggggcggaggcatcaggaaggaacaggaggagggagggaggcgagcagccagtcattccggaagagctgccgggccagacgcaggggctgggagaaagccagctggcaggcccagtgctctccttgagggcctgcccaggaccacggctggcagctgtgtggggcttgggtcggggctgggagggcttctgctggcagcgggcaccacattggagcctcggtggtcatggtcatcccaggcctggaaacagcatccgtctgcagccccagcctctccagccccagcttccctaaagggacagaacagcccttccctcccccacagggctgctgcaggagaggtgggaggaaaggcagagagacccagactcctgcactgggtggttgccttgtaaccgactgatgatgtgctaggtgtttctggagctgacctggccacaggaatcacgggccatacctgtttttcctgttttttgttgttttttgtgttgagacagcgccttgctctgtcgcccaggctggagtgcagtggtgcaatcatagctcactgcagcctcagcctcctgggctcaagtaatcctccagcctcagcctccctagtagctgggaccacaggtgcgcaccaccacacctggctaatttttgtgctttttgtagagatgagtctcactaggttccccaggctagctgggaacccctgggctcaagcgatccacccaccttggcctcccaaagtgctgagattataggcatgagccactgtgcccagccacacctgttacactaccgatccccaggccccttcctggaggtttggggcatcttcccctggaggctcttcggacaagcaaggagagggagcaccacccatgtgctggcgccgtggtcattgttgttggtcttgttacgtctcaaagggtgcttctgaggacagaaggaggaagagaaagagaggtgctcgcttggggctggagagttgcatgggaaacagcagcaactcagagcagagccggccatctcacagccgcgggcctctctcccctttctgggctcctagagttggaagtgagtggggccatgaggtcctggtgagcaagaggaaggaggaggaactggctttgcagaccgtgcaaagccggttcccgggaagcacacacatggcctgcaggaggccttgtcctagcatcacctgcagcttcaagcacagtccactcagcccaaccacagaatgggccccgccagtgggatgtgcgctctgggcaaggctcacatgtcctgtcatcggtcctgtggcctcctccttccctcggcctcccactgtccctccgtgtcaagtctcccaccatctgatgcgccctctggcaaggccagtgagtcaccctactccagacacagaacctgctgctgcctcacaggctcccgccatctgccctcctgcctctgctctcaggagaaggacactcctggaattccacatggatcccaccttctccctggagccctgccatactcctgggcaccgctgatgcgctctcctgctggctgacttggccttgaacacgggtggctcaggcctttcccagggacccttgcttcatgccccagctggaggaagccacactcacagcacttagcccctatggggtcttcagctcttactctcctggtggactcctcctccaggaaggccaccggccctgcctccctttgttcttagaaactgctcctttggggcagcccctcaactgttcaacatcctctgcccttccttgggcaagaagccacctttgggtgtaaaccacactccgttcagcacggacaaggcggtctctgcaggatgcagaccctcagtctcactctcggaggagctgctggaggctgtgcttttaaaagccatgtcaggccaagcgtggtggctcacgcctgcaatcccattactttgggaggcccaggcaggtggcggatcacaaggtcaagagatcgagaccatcctagccaacatgctgaaaccccgtctctactaaaaatacaaaaattagctgggcatggtggcacgtgcctgtagtctcagctactcaggtggctgaggcaggagaattgcttgaacccaggaggtggaggttgcagtgagccaaggtcgcaccactgcactccagcctggcaacagagcaagactccgtctcaaaaaaaaaaaaaaaaaaaaagccatatctaaaaccttctccagaccttgagccctccacaggcctcgttctgtgcatgagagggcatccgcccccttccactgcgagcctgttgccattgtaggggaggagctggccggccccagctttccagcctctccaggcccaagggggaggagtggaccccaggcactgagccggaagcctccgctacagcagggatgctgtctgtggtgcactccagggacacagagcagagcttttaatgggggtggctgctctccagtgaatcacagcaagagctagctgcttcatcttatcaacagcaggtaccggagagacagaaaaagaaccagaaatgggttgtaggttgaagtcaaccagccacgctccatgcctctgaccaaagcctaccagcactgggccgggcggtggctcacgcctgtaaccccagcaccgggccgggcgggggctcacgcctgtcatcccagcaccgggccgggcgtgtccccacacatgaatgttccaggcttcccttgtctggacgatgtgatcagggagacaccatcccagattctggctggtaacagagcaggcctcctcaaccctggcaccattgacacttgggctggacaattctctgtcatggggcagcatccgtggcctctgcctactgccagtagcacctcctgcccagttgggacaaccaaaaatgcctccctatgctgcccagtgttccctggggaacaaaacccctcccaggtaacatgcactgatacagagtaatcatctctgccaccaattttcacagattataacggaatataatgtgcataatgcaaaaattatattgaattctttttaaaattaccctccaccccaccttattccaaaaaggattgtaggtgacgttgttaaattaatctgctaccatgaaatttttaaaataaataatagcaaatatggggaaaatggaaaataagggtaggtcagtaaaataagtcggtggtaaaaataaaataccaaattcacccactagatgaccaggcagtgactggtgagggctgtgtgttttatacagactttccggcaaagaataaacccactgattgcttagaagtccagtgtcagccaagcgcggtggctcacgcctgtaatcccagcattttagaagcccaaggcaggcggatcgcctgaggtcgggagttcaagaccagcctgaccaacatggagaaactctgtctctactaaaaatacaaaaaattagccgagcgcggtggcacatgcctgtaatcccagctactcgggaggctgaggtaggagaatcacttgaacccgggaggtggaggttgcagtgagccaagattgcaccattgctctccagcctgggcaacaagaaaaaaaaaaagaagtccaaaaaaaaaaagtccagtgtctctaaaatttctaccttgggttctcaaaaaagaacacaatgtgagctaggaaacgccattcccccagtaagtgggcatttgtctagcagctgtttgtgtcccttagtatcatatcataaggaacataaattagtctttcctgggtccattgatccaatatttattgaaggcttttgggcacgtgacatggtgctggacggtggagacaccaagatgaccacatgcaaactgctccccaccccctggtgtccctgggaagaacatggtcagtggcgctcggagaagggaggggttacttgtgctgggggcctagcttcatagcgcacacacactgtctgagctgatgtcacaagtgactccgagttcaaaggcagagaaacaggaaaggcacttccacagggaacagcaggaatagaagcccagagggttttcaggcaggtgacttttttgggggagatgggaacagctttattgaaatataattcacgtgccatacaattcatttaatgcaattatatggaattaagtgcaattcagcagttttcatgtattcagagctgtgcaaacattgccacaattttaggatatgttcatcaaccccagaaagaagccccatacccttcaactctcactccccattcccaccccctgcaaccaccaagctttctgtctctacggattcgcctatttggattttttttttttttttgagacggaatctcactgtcgcccaggctagagtgcagtagcgcaacctcggcttactgcagcctccaggtgcaagcgattctcctgcctcagcctcccgagtagctgggattacaggcgcccaccaccacacctggctaattttttatttttatttttaatagagacggggtttcgccatgttggccaggctggtctcaaactcctgacctcacgatccacctgcctcagcctcccaaagttctgggattacaagtgtgagccaccgtggatatttcatatgaatggaatcatacgtgttctttcatgaccgtctttaacttagcatcatgttttcaaggttcatctgtgcctgtgccagtaattttttttttttttttttgagacagagtcttgccctgtcacccaggctggagtgcagtggcatgatctcagctcactgcaacctccacctcccgagttcaagcaattctcctgcctcagcctcccgagtagctggcattacaggtgtgtgccaccacagccagctaattttttgtatttttagtagaaatggggtttcaccatgttagccaggctggtctcaaattcctgacctcaggtgatccacccacctcagcctcccacagtgctgggattacaggcatgagccaccacactggacacttccttctttttatggctgaataacacttcattttctggagagggctacatcctgtttctccatttgtcggttgatgggtgtttgggttgtttccagtttggggctattgtgaataaggctgctgtggacatttgtgttgaagtttttgtgtgggcgtatgttttcagttatttgaggacatagctagcggggggattgcctggtcatgtggtgaggccgatgacattttacacttggtgactgaaagtctcgtgagtctccctgaactctgtgctgcttaacgtgcaccactggggtaagaacacccctggggaagagtaagatgccagccattgtgggatccgatgttgccagcctttgtgggatccgacggtttaccagagtgcagagaatgcgtaaggaagaggtagaggatttctgcgtctcactaggccagcatgcgtagcaccacttgaagctcttggtagaaacgccgccttccgggctgaacaccgccttctgggctgggcctcagagccactgattccgtaggtcagggggatgcccaggaccctgcctttgtaataagttcccctgacatgatcagatgttgaacagccctgtcctagacggtgagcgccatgagagcaggtgccttgtgatacacagtaggcacccagaggctctttgaacaaatcaatgtgatcctttttataaatagggaagggggctgttgaaaaattctgttagatagtctgagcaaattccatcttggccctggctttgcacatttaggggaagtagggatgctaagatttgctgctggtcacaccctataaagagcctccaagtagggagaagggtagggggcaaaagacttaacctgagccctaggtaggggccaaaggtggaatggttgccatctgtgcctcttcagcagcccatgagctcccgggaggccagggctgtggcctttgaatcctggggtccagcctcaaggaggggtgggctgtgcatagggttgcctatcccccgtcaccccaccaccttccagtgcccttagtacctcctggcaggacaagagggggcccagaaggcagctctgaccagggtccacctgcagggtgtgagggggacacttgggatcagagggcagagccagcccctccggatgctgaagaggatgaagtaaagtagggcaggggcttcattcagccattcactcactgattgcagagtatgtattgagcgtctgctgtaacctaagttttactgggagtgttggaatctctctgtccctttgacccccgcgtttccttccttgggccatctgtgtcataaccatcaagacgcagtggcttcttcacatttctggtgatgttgcttctccatgtgccaatcccccagcggataccccactctccggagggagaaccccaagcaggtgccgctgggcatgcgccagggaggctgtgaccggagcaagcactgccttgcttggagctggctgcctacaagctcagacatccagcccgcagagtccaccctggctgcagcgcctgcccaggcctcaggccagtcctggctcagcagctgtcagcccggagcagccagcgatggcctcaggggaccagccaaggcaggcggcttgtgcatcctgcttcattaataatgaatggccagacgctgcccgcgcctctccctggtcgcctcattgacatggtgggagcctcagccgcccacagcgcgcagagccaggagctggatcccaggccccctcagaaagactcaagaagccccgagaagcagctgctccccaagaccccctgagctgctgccccagaagagcagtcacagcggccctgcgcagccccccaggccatcacctccggctccacaagtgacaccagagagagccctcccttctccagtccaaggaaggcgggtgtgctcatcacccgtcactcatcatcaggagtaactcacagcccagccctgcccaacacttttggagactgttgggctgaggacttgggcagccagggctggttgagggtggggacagaggaaggacctgcagagacgagagatgtgaggggaggagaaaatgcgcaccccccaacctccagccgcgcttccagcaggtcttctgtacctcgggcctggaaatgtgactccctccctcagagctgtgcagccttcttccccaccgttgccttcggaaatcctcactcctcaaggaatgcctgcagcttccttggcttctggataaagtctcgtcctggtcgggggagaagagtttcttggggacagatggctcctgagcccaaggggacaggggacgcagccaggatctgagcacccggcctcagcatgcaggtgtccttcgtttgctcggagcacagcctcaagggccggggccctgaggatcggctgggccgaccggcggccagcagtcccagcctgggctcccgaggccgcttccgcgccgtggccatggtggcccggagcctgggacagctgtcggtgcagagcctcccgtgtgccggtgacaccagcgtgaagcagcaaaggatgaaatataggtacgggggcacacagctttgcagggtgggggctgacctcccggcctccccaactccccacctcctcactttcgagagcgcataaaatctgcaaatccccatttgtcagacttgggcagtttgtgctgagggccgggaggggctgtgcttagtgcttggtagatgatgagaaacagcgtggagaatccggtcagtgctaagtttctttcttcccagtttcagggggagatggtgagggcgccgtcttccttccttctgcctctgttttctttctgagggtcgtttacaatagccaagccaccaatgctcccttttcctggggaaccctgaggcatgggccacagggcccccccaacatcctcctgccctcccctgggcacacaggctccacaagatgccctgggggtggtctgatatctttccagccaggccaccatgacaaacatccgtttgatagtgagggactgtggggtgaaccctgtgatggaatgaatcttccctcctccacctgagccaggcccagggcccaattcctctagcaggcgggactcttgctccagcaggcacaggcagccaggccgcatctggagtttcccgatggtcagcccaggcaccttgcttccctccacccgggctcagcccccatctggctcccggtgctgtgacttgtatgtggggaggatgccgaccactcatgtcaggagcagggcctccctcctcttccctgccggggcctttctccaaggctgggtgaatgtgcccaggatggaaaagggagggtcccagctttgtacaaagggtcccgggagcagggttctggggcacccttctgggggccggccttcctcactccccatgtaagtctctgagtccagagccttgattgcgtccagaaccatcctccaggcataaaggaagtctccacaacacgtggtctacagaagctggaaaagctaaattaggtctctggttcccaggtttcctgggaaagttttcccaaaacaggaaccgaactggggacaactctgcttttcagtgacctgaaactggagtgcaggccaccagcctcagaaacagccacaaactgttctcattgcatttgggaatcttctgggtttatagctggtatgggtgccaacctgaaaagcattgtgagtccatcctgatgcctgagctgtgtggcttaaacctctacaaaaccaatgcctgagagttgggcctcgtgtgaaaaccgtgtcatctaagccaacccttgctggaggtgaattctgggatgactctgggggtcctgcatccacattcgtgtctcttccttccctgcgtcctgggagggtgagacatgctttaatgaacctctgggctgaaagtgtccaatcctctaagcttaatgacagtccagaatggaattctctgttctagaagctctggggtttacatcttttgttaagtagggatcaaaagctaaaattagagccaggagaggtggctcatgcctgtgatcccagcactttgggagactgaggagggtggatcacttgagctcaggagatcaagaccagcctggccaacataatgaaaccctgtctctaccaaaaaatacaaaaattagctgggcatggtggtgtgcacctgtagtcccaactacttgggaggctgaggtgggagaattacttgaactcaggaggcagaggttgcagtgaaccaagatcacgccacagcactccagcctgggtgacagaatgagagcctgtctcaaaaaaaataaagctaggagtaaaccgaacatgtatatgtatattttttggttcagatacctattgccttctgcaacttttatgtcagtcctaggatctcaaaggagttaaaagcgggactatttctaaacataaggcactatgtaattggaaagtgtggctgttaacactgtttccctcctaaaactcattgaggagtggctctcagagggtgaatgctcaccacgcccatgtgtgtgcttatgtgtgcatgcacacacgtgcgtgctggaggcagggagggcaagacagggcagtgaaggggggtgttcatcaggctggcaggtttgcagtctgtggaccagagttcaaatcccagccctggcactctctgactgagggcgggtttgcagtctgcagaccagagttcaaatcccagccctagcactctctgactgagggacccccatctctccagtggagttgcaaacaccgccttatacctggccaggcctgggagctttccttgctgctgtcacggcgggagggtaggttcatagccctgtaggatgaggtgcagtttcacaggggctgagatgggccttagaatccaaagcctgtgccatcgggcacccccgccccgggcctctcccatcccactcatgcggtacctgcgtcatgagttgctgcacagggactgtcccagggccacagccagggtgcaagaggggggcagcagggactgagggggagcctgatcccagcctccctgtgactctggcctcctccctgggaagctggcccttcccagtggtgtgctccaggcacagctgtccagtgacacgcacagtccacaggtactaggaaactaaaggtgcatggccagtaccaggcgccacattcttgcccaagggcctaaggcgtgctcagtgtaggatggcgggaggccaagcctgataagtaagggaggggccagcacttggtcccgagagtctgaccccagggcctgggcttctcacccctgaattactacccaacatcgtcccaaacaagcactccctgggaccctgccactgccagctccaattagaagacaaagactggaagcccagcctgtccttagggagcctggaatctcggagcagggcaggcgtgcaaacatcatcactgcacggagcagacaggcgagcagggcactaacaggagccaccccatgtgccttcctccgcaaccagctagccaaggccacggtgcttgcccttcacctgatcacagttttgtcctctgcccaggtggctccaatgaaaggccccaaactcctctttgtaaaatgacctgtcatttcccggagccttccagctccggcccttcccaagtctgaagtgcagtttttaggggtgtgcagcagccgggggctccacgatgggcatcagtgctcccctccggcagaggttatgtctgtgagtcctcactccaggagtccagaccccaggagagacatgaggcaaattaatgaagaccgacagtatttgggtttcgagatgttgaccacctgcttcattaggatgtcaggtttcaacgatggggaagaaatcggtagaaaatgatctctgtgtctgggaagtttcaagtacagcagggagcagccccatccagacccggctgagacgtgtgctccccaccccacacgcagcagccatgcttacaaagcgttcagcctggaggcgccctgtcccttcgcatcccttctcccgaggcctggcagcggatggcagaaccaataccatcattttcacagggaaacaagttgagcagggtaattgcggcatcacgtggtgccctagttttgttaaattagtcctgtgggtggtgggtggaagagcggctgaacccagagcccactcggggaagtgggcccatttcccaacactcagaccaggaacagatatggaatcaggggcaggggcaccttttgccagccctccccaaactggtgaccaaggggtgcctcttctcttcagccctgacctggccttcagcagagccttttcaagcaactgttccccacagtcactcgtggaggtggttttgcagaggtgggggccaggcctcccttctcgatgcccagacatatctagaccagtggggtccagggctctgtgaacacccagacattgcaagcaaggttcgttctgagggcattcgtatctaggcatatttccaggctttatctgtttttgcaaaggggttatgaccccaaagcagctgagaggcactgatcagaacctccagccctttgcttcattattggactcctactaagcatttataatttcttaccacagttactttctagccagcatgggggaaattacctaaacttctaaactgaccaggcttatgtggaatgtattagtggtacagttgggctgttctccccagcagccacagacacgagttattctgggttggaacatgccagcaattcagagggtactatcaagagtatttcactgatgtataaggaggaaaaaggaaacttcagttcctttttaacatggtaatagttaaagcttatttgatttgtccattgtttttgaataaagaaaaggttaccctcctgctctctttgggaaatgagacacatgtgagtcagtgtcctgtggccttctatcctcatggatcttcttctgtcctcgtggcagccaccgtgagaaaggcagcctcgtgagcccattctgcagatgagaacactgaggcatcgggccactccataaaatgcccggtgtcctccagccaggaaagttgtaccaggatttgggctctggcttcagagcctcagcccatagccgccacccggtgcgcccctttcctgaaagaaaactcagcttttcttatgttctcctttagggaaaatcccagctctgcctacaggagcaatattgctggcagctggagtggttttaataggaaattgaaaaataaacctaggcaattttaaagtaccttcagtttggtgacacgttcaactgttttcaagctgcttacaaatattatatccactcatgagttaggagtccaggagccttataaccagggaaaccgaggctgagagggacagagtgggctcgtgtcagaagtcgggggttcagaatgaggcttgagccccatgccgccttcccaggggccaggcttggacaggaaagaggataaactgaggacatcgcatcctccgaagttggaagtgtcatggccccagggaaatgcagggcccttgggccaggaggctgggcctcacccgctggtaactcatggctctcactccccaccgcctagaaccagctgccccttgaccagatgctggcagctggattccacaagggaagtggaatctgaccccagatgggtcaaggcctggctgcagctgtgagatccacccggccacttgtcaacctcaccatctgggcagatcacgccctgcttaacaggctggggtgtgggatgcatgccaccatggtggggaacgtgagctggcagccaactgcctgggtgggatccagctcctccgcgtgctgggcaggtatcgtaacgtgggaatcgatgtcacgacaagcaaggcgcctgctgcgtagggcacctgccgcttaggactcctgccaccgcgtagggctctgctgcgtaggactcctgccgccgcatagggctctgctgcgtaggactcctgcggcgagggctccctcctgccgcgtgggctcctcctgccgcgtgggctcctcctgccacatagggcacctcctgccgcgagggcacctcctgccgcatagggcacctcctgccgcgagggcacctcctgccgcgtgggctcctcctgccgcgtagggctcctcctgccgcgtagggctcccgggaggatccggggacaggatgcctggggactgcctggcctgctgcaaccctgcaggctcctaggcaacctgtgccaggacatacgggcatgccggtcctcagcagagggctgccaccctccttcacctcctaaggacagtcatgatggcccaaggcctgttcctgtggaccctgggatgcaccacagtgggcaggtgcctcagtggccccgggaaggagcccgggcagctgtgcttggttaggaggcctacgctgccaggctctgccgctgctgttgggcctggctgtggctgtaacaaaggaagggctggccttgcttgagaactggcagccctaccatggagctccccgcaccccgagggacagatgcacaggccatgtggtccagtgaagtgggacgatctcctgccccagtcgctggagacaggaagaagagacacaaaatcacaaatgcagccttagagaggaaggaagaaggggcttctctgcaaggggcgccgcatggatggtgccatgggggtgagaccagtccagtttcgccataaaacagacagcgtccctgtgcatttccatctgtccttgagaccactctgcagacccccactgggcaccagcagggcccgtgccagcagcatggtgtgggccgggggcagttggcactttacccccggggtgggtgagcagaggcacctctctgaaggtccccggtgcctttcggagcctccaaacacacattgactgttgggggagtgggtggggggctggccctggcgggaactgagcctggctggcagggtcctgcctgggtgctgagaactcacgtggcgtttgtttttcaggaacctgggcaagtctggcctgcgggtctcctgcctgggacttggtgagtgtgggggtcccctccgtcccaccagggaaacaggctgtggggaggccgggcatggactgaactggacaccccttgggaggcagggtggcccaaaccttggcactccccagggagtagctgcacccagagcccaggattcaggggggctcggttgccatggcaacaaagaggcaggtgggaggggggctgggatagagggagagagacacagtctcagcagaggaggtgaggcggatactaggggcccctccacacatggtccccaccccacaccacaaaatcagaggcccttagggccccgggagtgcaacgaagacaccttaccttccaaggcaggctcagctcgtgagtccctcctggagcgccattggatttggccctttttcctctcctgtcagatacaaggcctgtttccagaatgtgcagtccccacctcccctctgcatgcagtacacacacccccacacacacaccgcccactgcagtacacacaccccgccccccaccagcacccactgccctgacaccgccctccccgctctgtcccagcaggagcacgcagacgcggctgtcagacctggtgtgttttcagagaggcatcccttgtgccatttcttgcggcatgtccttggaactagagctgcctcagtacagctctgaccagcatttcaaaagccccagacctcctggacccatagccagcagcccgctctagagacttttgtcccctcagtttattgaccccaggagagcaggactttctctgaaggccagctgtccacacacactaaggacaccctggccacagagcagcacagagggacacctgtggctgccccctgtgccctacagcctgaggtctgagcaccgacgggataatctggcttcctgccaggttcctaacttgagcccctgtgtctccttccaggaacatgggtgaccttcggaggccagatcaccgatgaggtaagatggggctctcccagcaccccagaacccagcacgggctcgccagagcacatggttaagtctgccgcgtggaccagtgagcacgtgctcccgggagccagcgcagcagcctccctccctctttctgttttgtgagggcgccctgccccaggggagagtagaaaggtgagccaggtggccatggccagaggggatgccgagtctggtgccatcacccagcagtggatgcctcgggcctcagcatgtcccttaagctccccaggactcagatttcccacacgcgtgacccccattccacagttaacgaggagaattcagggtgcacacgcttcccaaattctgaagccggatgcaggtcctagctgcccccatggaggctccagtaactgtctgtcttggtcattgggaatgcagcccctgcagtgtcacaagctgaagaacctgagatctgcatttcacccaacatccactgtccatttcccagctgccgcgaaccgtgcggatcgcagtcagatgtatttgctggggctcatgtccccacaattggaacaagaaagtgaacactaacaaaaagccagcttgtatgccgccagcgcctctgggtctctcggaaggacagggacggcacacgcccagacatgtgtgcttctggacagtgaggcagcatctcagaaatgagagcagtggcatttgctcagacagctctgggcatctgcacaagaagcagttttcacatttatcctacttagcactagaaaggttgcgtttaaaaattgatcagcgaattgatgtgagaccttgttagctgcgattgctcagtttccaagggaaagctttgcttctatcaaaatttaaatgcgtacagtttgtgtttgaggtcacttttatctttaagacactagctggccgggcgcggtgactcacacctgtaaccccagcactttggaaggctggggcgggcggatcacctgaggtcaggagttccagcctggccaacatggtgaaaccccatgtctactaaaaatacaaaaattagctgggcgtggtaggggcgcctgtaatcccagctactcaggaggctgaggcaggagaattgcttgaacccagaagggggaggttgcagtgagccgagatcatatcactgcactccagcctaggccgtagagtaagactctgtctcgaaaaaaaaaaaaaaagacaatagctggttatagaatgatttgccccttgctttgaagttgctggataggcgctatctcagggtgaagtctggagttattaaggcaaaaggaattgccttacctcagcccaccagattggttcagttggagccctggggcccatatggttcaatctgaatcagccttgcctgacttggcctcgtttccctttcgatgtggtttctaaaccaggatgggagaattctgtagaacggcataacttcatttccaaacaatattagctgggtggcctgtatgtccttgtgggaaagataaaaacaagcagacagactagacccatccaatgagatgacgttttcaccagcaaaccaggcatacccttagagcattaatgaatggcccagtggcagccccgctggcccaggcctctgcagtgtctccatcaggaacacagtgatggacatgtgtgaagatattggaggtcatttctagatgacaccaagctggaaggacagagaataaaatagatggcagtgtcagggttctgaatggttgtggcaggtgaaaatggcttagcaaaggagcaagacaaatttttgtattaatcctatagttagtgtcaaaaaagaaatcaatacatctagaagggggggcccgcctggctgcggttcagatgaaaagggtttgtgcacttcaggtgctgcggctcagtccgagccagcagggaagcaaggaccgtcctggactgctttttttgtttttcagttttttattacatatatgaaacataaaatttgccattttaaccatttttaagtctacagttcagtggcattaagtacattcacatactgtgccacccttaccaatatctgtttccaaaatatttcatcaccccaaacaggagctctgcacccttaaacaacaactccccatcccctggtcacctctagtctacttcctgtctctatgaactctgcacactgtttgtataaataaagttttattaggacatagccacgcccatcatttacacatagtggctgctttcactccacaagggcagagctgagtaattgcaacagagactctctggcccacagtgcctgaagcatttactatgtggccctttacagaaaagacttgacgtctcctgttctttgggccgcagcagctgtaccctgcactatctgcagggctgctgtgtgaactgctcagcccagttctatgccatgccagggacaaaatgaaagcttgcccaggggtggaacaaaccacctggtgaggcaggaatgacagccaccctcacatggcacagggcagagtccacagtttgtaggacaccatcacactctcagccagtgctcacaggagcccatgaagggatcaaactatgctaggaaccctaaaatgacgtaatgcctgtcggagccaccacggtggtttcaggtctccagccctcccattgttaggtgccctttctgtggcctcacactccccattagaagcatgtgttcaagacaagctggacaataaaaatttaatagatgtaatggttgagaacctaacacttattatctcacctaatcctctatcaacccagggaggcaggtgctattcccagttcagggaagctgagcctctggctataaacaggtgcaggggcctcacctggcctctggccacagggggttccacctggtgctctttgcctcaacgcttgcggccagtgctcagctgtggggtaaccgtactggggtagggacagattccttgtccccccagatgagggtgacagggaggtggcctgtatgtctcctgagcttccttctgacttcagtgtctgggacccagatactggaaggaaccaaaaagtcacaacataaaggctgcgtaaactgaaccaggatgcagccacagagcggagggctttagaagtcatgttttaggtctaggggcggtggctcatgcccgtaatcccagcactttgggagattgaggcgggtggatcacaaggataggagttcgagaccagcctggccaatatggtgaaaccccatctctactaaaaatacaaaaaaattagcggggcgtggtggcaggcacctgtaatcccagctactcaggaggctgaggcaggagaattgcttgaatctgggaggcggaggttgcagtgagccatgatcgcaccactgcactccagcctggatgacagagcgacactccatctcaaaaaaaaaagaaaagcatgttttgaagaacagcatgggaaaggcccgtgacagccaatggaaaatgcagccagcatagacagcagtctgtggagtagagctgcagttttctagggaaagggcagaaaaacctggaagagaaagtacagcaaaatcagagccgtcaaaacataaataaataaaatagtgagaaagcagagccccacagtgccgtgagtcgctccctctctttcctgcctctggtcctgccaatcccaggcgccaccctggatgtagctggaattgtatggtggcttcgtttttgctgagggacaggtgaggttagggttggtgtctgcagtgccggaccctgctgatccggctgtctgcacgccttcgggggtctgtgatgaccacaggtttctgtgattggccgggctttcctcccaggagggagccaggtgtgttcagggccaccgtgctccggagcggagagcgccgagccctttgttcttagtctatgagcaggagtgggaggcctcccggtgggcagagcagagccaggagcatccggggccccgcctcaggcttgcggagcccctgcctagcgccagctccctgcctgcttccagcctcttcccagtcactgtctttctagagagggcgacagggtaaagaggcaggcaagacaccgtctccagtggtcgaacagcatgctgtggagagggtgcgagctgcctgtggctgctgtaacaaatagccaccaatgcgcggctgaaaacagcagcaacgtattctctcacagctctggggtccagagatccaaactcggtacccctgagcctaagtccaggagtcagccgggccgggcttccttctcccggccaggacctttcccggcctaagtccaggagtcagccgggccgggctcccttctccaggccaggacccttcccagcctcttcagcgtctggcgctgctggccttccttggcctgtgcccgcatcccccagtctctgcccctgtggatactctccgtcctcctcttctgtcagtcaagtctccgtctgtctcgtcctcataaggtcacctgtgatggcactgagggcccacttagctaagccaggacattctccccactgcagagtactcacgttaatcccatctgcaaagtccctctttctacctaaggtcacattcccaggttccagggacgtgatacctttggagaaccattatttagttgactgcagagaagaaagtagaaaaaggagggcaggggggcgggggtcctgacgacagggtggtcaggaagcagaagcgagcaaggacgccacgtggtggtccagagaaagagccttcgggggccaaggggacaaccaaggcacagccctaaggccgagtgttggggagaaggggatgcaggggatagagctgggggtcagggtgcagatctggtggagactttggctttgaccctctgcgagatggaagcccctggagggcttttgcatggaggaaatttgacctgatttaaaaggtctgccaaggctcgccctggctgctgcactgggaatggcgagtcatgaggatgtcccagagttcagcgtgtgcacgatcccatgtactcggaaggcacatcctgatgtggcagggctgtcgtggagcctgggaggccgcatttctgatctcatgctgatgctggcccatggaccacgctttgcctggggaaggtgcagggagagaggatggaagcagagagctaggaggctattgtgagaaaccacccaagagccgctggaggctcagagcagggtgggcaccgtggaggtggggagacgggtcagattctggactaatttgcaggggaagccgcggcaggggctgaacttcaggctccagtgatgggaggattagtcaaggagggctccccagggtttgaccggagcacaggtgagcgagacctcccgggagctgatgctgccgcaggctgccctccctggcccacaccagccccagggcctagagtgcccctcccccacccactctctccttgcctgcctgacaaactcctaaacacccttcaaaacccagtctttgtcggccgcactttgggaggctgaggcgggcagatcacttgaggtcaggagttcgagaccagcctggccaacatggtgaaacctcatctctactaaaaatagaaaaatcagctgggcttggtggcatgcacctgtagtccagctactcaggagactgaagcaggagaatctcctgaagccaggaggcaaaggttgcagcgagccaagattgtgccactgcactcccgcctgggcaacagaatgagactccatctcccaaaaaaaaaaaataaccccagtcttggatattctggacatgtgataccccttggatgaaccttgaaccttgaggacattacactcactgaaacaagccacaaaaaggacacacggtgtgactgcatttgtctaaggtgcctagagtagttaaattcataaataccagagaatgatgggtgctggggctggaggcagggagcggggaaggggagttactgttcaatgggtacagtttcagtttaggaatatgacagggagatggatggtggtgatggttacacaactatgcgaatgtacttactgccattgaactatgcttgaaaaaggttaaaatagtaaatttcatcatatatattttaccacaacttaaagtctctttgataaatgcagtaatgttttaattaaacaaaaagaatgaaagggatcttcatgagcaggtgtggattggtttttaggatgtattgtgagtgaaaaaatcaaagtgcagaaacatatgggtagtgtgccacccctcctggaagaaagatgggggataagaaaatacatgtgtctgaaatataaaaacagaaaacggagccctgggtcccctcctctgagaagccctgccaggagcgtgagtgccctaaccacagacttagccccttcggggcccagcgcaccgtgccctcctgggctctctcctcctgggcctggatgtgggaggcatctgggaaaagtcaggaggaagacgaggaggaagcagtgagcaggtgaacaagccacccgtctgtccgtgctggagccctggtgctgggaaggaaagtgctagaggtggggagagattcctgggctctccctgggtgggcacatccgggaggaggaggctgggggggcagcagcaggtccctcgggcggcggatgcatttgatgcatggatgcatttgatacctcagggcagttgagctgcagcaggaagacaacaacagagccccggcaggtggatcctgaaaaccgacggcctccacccccgggcttcctgactcaaatcacagccgctcactaaccggggctcagcttcagctgtgctgtatttcagtgtctgagatgtttggggatgagtgccagtgtcgccaggctgccggccagatttccatacaccccccacccacaaacatgctgcctttctggcttctcttgagaggttggcagatctctagcaccaggtccgccttcccacgtgcagcatttgggcatgggccttctcccatgggtgccccccagtggtggctactccgtcctcactctccatacctcctggccacaagggcttctgagttcagaaaggagagacgcagccctgtgaagccacccctggctggttttctgtcctatggtttttgagggttattaagaattattcaccccacgctgggcttgttgctggtgaggcccagtgctctgagccgcacctggggaagcgtgacactcagagggaagcagccctgtccgagagccagaagctcaggggcacctttctctccggcctcttggagggagctgtcacttgcagaggggctcccctcgctccatgagtcccaccccacgaccagttctttgctcatggagcacaatcgcgtcctgacagcagccatggagcaaagtctgatgcacagcgcatttagctcgggcagtcattcatccatcttgcccatgaggcagccaccaccacagcagtgccgctcagggccgggagtatgtgccgttggagaaacactggacaagaggccagaatggatgtcacccaccatgcaccagctgtgggatgtcagttgctccatctacaaaaataacaattcagtcctcatgtgcaggtgctgggaaagattcaatgaggtacaactgaatacaccgccctggctttaaggacatagactcatcccagcaacatccacagagcccctgctggggactgccttggtttcctaggactgctgtaacaaagtaacataacctgggggcctgaaacaacagacaccgttctgtcaccttctggaggccagaggtctgataccaaggtgttggcagggcaaggttccctgtaaaggctcgggggagggtccgccccatgcctctttcagctcctgggggttgccaacagtccttggcttgtagacgtgtcactctggtctctgccttcgtagtctcatggacttctgtgtctgcattttctctccttgtaaatcaccagtcacatagggtgtaggacccaccctaacacagtacgacctcatcttcgctaattacattgaagaaggccctattcccaaatgaggtcacctctaagcttctaagtagacatgaattctgtggggatactgttcgacccagtacaggtgctaagccctgtgatgaccccaactgatggggtccctgctctcaagaaattcacagtccttggcagtttcttcattccttttgccttctttattcttctcaatgggtttgttactgagagctgcctccatccctgtcctgtggcaggagagggcaaggagacagcccacaggggagcctgtcgggcccgggagggcagggcctggacacggggaggcctcccaggccgagagggtggtgctccagagcctctgggccccacccccggctggcaggacagtgtcggttttctcgtttcagatggcagagcagctcatgaccttggcctatgataatggcatcaacctcttcgatacagcagaagtctacgcagccggcaagtacgtgtcttttcacacgggaaaaagtggttcagaatgcctgggcagagccggagctacagggattcctgccgctcgcgttcccaagagtgctcacaaatgcaccttgcaccctgctttcatttttaaactctgaatggctttaggaggtgctattttcatggggctggaattgcagaacacttggacactgatcacttgctgaactccccgtggagccaccagggggaccacagtccctctggtgccaaagatgctgtgctgggtgagaggcgcgatggagctgctgtcctgggctctcctgatgtgcctgacattttgacatttcatgtctcacttgtgcaactagggctgcagggcctcagagctggggagggcaggctccggccaagtgctgtggggagcacttcccatcttggcggtgaactttcctgctcaattatgtaaaagctcagccttcttcagccaggctgttggcttcaattttaaagactggctgtaatcaaatcatccactctcctgcatcgggtttccagaagtcagcttttgtttgtgaaatcatttgttggccctctcttcatcctccttctgcccccctcctgcctggggccagccaagttcccgtcagccgggcaggctgcaggcctgggctgctgtgcaccatagctgcttggcccgcagctgcttcgtgggccctgggtggttacctgcaactgcagcggggcccagagcacccggcggcagggaacccaactgggccctgctcaagttcccacccagagcctggggagcgcacagccctgggggctgccgctgggaccctcaaaccgcctccagcccccatctgcagcccttttggccctccggatggcacagccccctcccactccctccatactggcagcagcttcccatcaaagtgaactgctttccagacagatgagcccagcggaggggtctgaggtcaaaaagcccagtgcagatgccaagccgagaggcacctcccgtcccgagccccccacctcttcgctgcctgctttggcctgggttatgctgccctgaagaatgtgtgggaggcagctccgtgcagcctccgtggatgaggccgggcacaccccatgtcacagcagccacactccgtcctctgtcactcgcagtttccatgttcccctgtttaactggacacccagagctggtgagctgggcaagttccctgggtctccggcagcctcgggcctctcggaagccgcttgccagaagaccggggagtcagggagcagcttcccctcaggtcgccgtttctgtggaatcccctgccctctgctcctgggccggccactgcggtccctctgtccagctcagagctgagcccccggtggacgcccatcagtgccctcacaggggagctgggcgctgcgtgccggggataggcagggagaaactgctttggggagtttgggggaggctgagaggcagcttgcagggggccaaacccgtatcttcccgaggccccttgcttctcctgctgacactaatttgcacgcttctcagagagctgcaggatttctgtgtcccgcgaacagatgtgagtcctaccaaatcacagccagagccacaagccacaggcttagataactcactgtctgctgctcctctgccccagagatcgctgctagcttttctctcttcctcctcctttcctgatccccaaatcagggaccaaggaataaaaggaagaggcctagggctgagtgaattttctgtgtgtcttgaccataaatgaggagcattcagagcgcatgctaaacagcttgcaaatcagagcccattatttctgagtggatgactcaggcgcttttataattggaatgtagcacagagtatggatcattctccgtctgttgttttgctcagaaacattttgctacaagcagaaagttcttcaaagttaatccagtgctgcagtgccaggcaaggctgggacggccgcccatgcccccagctggcctgggtttggtgcaggacccagtgatgccaaacaggacagacagtggtccgcctagcatctgactctgccgttcagtgcaggaaatgagagggacacgtgcacccacacacatgcacacatgtatacacacacatatacacaagcatgcacagatctgctggaaatccagcccttgaccctgagtacatgttgattgtctctcaaaacagagcgtgacttgatgaataatttacctttgaaaaaagatacttgtcccggcgcggtggctcacgcctggaatcccagcactttgggaggccacagtgggcggatcactcgagatgaggagttcgagaccagcctggccaacatagtgaaaccccgtctctactaaaaatacaaaaattagccgggcgtggtggcaggtgcctgtagtcccagctacttgggaggctgaggcaggagaactgcttgaacccaggaggcagaggttgcagagagccgagatctcgccactacattccattgatagagcgagactccatttcaaaaaaaaaaaaacaagatacttctctggaaattttgcccacctaatgttgccaggcattttccctggtgaattttcagctgactaggaaatgggatgctcgacagcagctccttccttctgtgtgagagctggggccgccactgcttagacacgtgtctgcaggggaacatgccacagccatcctagtggggggcaataacacagctgctcccactccctcgggccaaccctgtctgtggaatgagctactgagccaaggcgggtgttaacagcctggctctctggccccagtgacattttcacagagggaaccaagtggccagtggccacagtgggtctgggtttgatttttctgtttggctgtgatgagagctcggtgtcttgttttgcagggctgaagtggtactgggaaacatcattaagaagaaaggatggaggtaacggccctgctctctgcggcctgtccctggggtgggtgcgggcgaactatcccagggtcagcctcgtcggcctgtcgtgcagtgtcgtaaggcccgcaagtccccacatctttcttgctgggaagtggagaggaaaattcagttctccaagagtaggaggtgactctgcttgagaaagaagttgaagggaggccgaatacactgtccacccccaccctagcctgcccactccgcctctgtcccaactcatccacagagacccagagcaccagggtccctgcttgcaaagtgtcaggccaaaaagagcttggcgtgagaacgggcctgggtacagcaaaggcgtgctgctacagaagatgtgggtgcaaagcacttccacttctttggctggagcacttagggtcaggggagccagggggccagagaagggagtggctcagagagcttgggggcctggggttggatcccaccctgcaccttgtccacaggatcttcgcggcgtctcagcctctccggagctcactgttcccatctgtaagagggtgtgtgtgggaccgttccggcagggctatcctgagggtcagtggccccaagtctgtaaatcacccacccagctcagggcgggacgtgtcacactcctctgggaagtggtcccctccagcacagaccggggagcggtccccgggtgtgatggagcccaaaggtcgcagatcgggggccatccacccttctctcccaggagcctatgggcccttcccaggccaaggtcctcacccaccttgggaccaactgggctgagcacttgcctacattttgaggctccccagacccctggacacagctttatctcaaggtgctgacaagccccggggccctgttccttaataaatgcgtctttattttcagaaacatcagaagcagttataaagttgggcctccctcctccctcccctcgaaatgccactcagaatcccagtgccaaggggagcccccgccccctcccccatggattcctgacaccccttcctcttgtcccatcaaatttgttttttggcaactctgatcccaaaacaaattcctcctcaccctgtaattaaacgaaattgcacgtattagcaaatcccctgatcacgtctttggcgaatgtgcatggaggtggtgtggggtgatcccccttcctggaggtgacgctgcctctgccagagctctgtggccgatgcttcggggcagaggaggcctcctactccagcctcgtgagctgcttccctgagcagcccgggacccgggtgggaaagaagctcagccatggggcaccaggaggtcattgtcaccccctgggtgggaagtactccctcctctgggaggggtcaaggtcaaacgtggctgggaggggccatcattatcccccatcccaccaggacaaagccactggtatgggcatttgtctcgtgtggacttagagcagaagaacgaattacttccctttgcgctgctcaagcccaaatcctcagaattctctgcctcagctactcaaacccagaaccccactggcctggccacacttgggctccctatgcctcccctccctcctttggtgccccccaagttaccccgaccaggccgtccttatgcctcccctccctcccttggtgcccctcaagttaccccgaccaggccgtcccacacagattttctgcaacacgtgtcacattctgtagggaacgttgcagagagcttccctgcctgcctcccacctacatctttccatcctcaactcctgccagatccccccagagcccgcccctgccccctggcccacacccggcctcctccagccttggctcttgccacttcctctacctggatcaaatccatgcacccctcatagtccctgagccaggcccccctcccacatcctgggcggaaggcatctcctccggactccggtcacactaggccccccactgtccaactcccactgcctgactcacagttactgcctcggtggctgcctcctggctccatgaggagcccacgcaccccggctgggcacgtggtacacatcatatgatggagaagtgcccatttcatgccccaggctcctgggtgggagggctttcaggacctctgtgtgagagatgaggacgtcggggatgaaggaggaccccccaggggccgggcttatcacaccccttctttctcttctgttccacaggcggtccagcctcgtcatcaccaccaagatcttctggggcggaaagtaggtgcaacagctggcgatgcttccagccccggcccagcagccacggccccgtgctccccagagacccctgacctagaaggctcctggggtggcgggaggacagtcctccttgagaagggagagtggtcggggtctgtcctggacaggccccggcccagtgccatttcctgtccccagcaggggcagagctggtgtttctgcagccatcagctatgcctggtgcctgtccctgttaagggacgtcaaatccagaaaagaagctgtggccgagtttgccttttacaaaaacctcgcttaactttcctttttactcacatggattattttttcctggtcactatggtaacatcataaaaattatagagaaaacagaaaatttgtgaactgcccaaacccccaaagcactccaaattccctgggccgcctgtcacccctgcaggtctccaagtgtctagctccatagtttctgggctggacacacttgggctcataggaattataactacgattcattcattcattcttttttttatttttattttgtttttattttttatttttttgagacagggtctcgctttgtaatccaggttggagcgcagtgccacaatcacagctcactgtagcttcaaactcctgggctcgagcgagcctcccacctcagcctacagggatgagccaccatgcctgactaatttgtcctttttctctctctctctttttttttttttttttgagacagggtctcactttgtcacccaggctggagtacagtggcgtagtcccagctcactgcagcctcaacctcctgggttcaagtgaccttcctgcctcaagtagctggttctacaggcacatgccaccatgcccagctaatttttttatttttatttatatttttatttttgtattttgtagagatggggtttcatcatgttgtccagcctggtctcaaactcctgagttcaagtaatctgcccacctcagcttcccaaagcactaggattgcaggcgtgagccaccacgcctggcattaatttgtccttttttaagatatggggtctcactatgttgcccaggctggtcttgaactcctgggctcaagtgatcctcctgccttagcctcccaaagtgctgggattacaggcgtgagccactgtgcccagcctgatgtgttcttaatttaaaaaataataataataataataataataataagtccaaatcaaacagacgggttaggttgaaaatcaaagccccccaccccctgctgctgcccccctcccctctgagccctgtgaccaggcctctccctgggcctctgggagttcagccctgtagcctcgggtccctacccccaaagtggaatccgactccacacggcatttgctgaccctgtttttgcgtctaacattgcatcgtaaacgttttttgggaggggccagggtgccaaaaccgctggtgacatcacacgcggtcggcctgttttccagggcggagacggagcggggcctgtccaggaagcacataatcgaaggtgaggacgcgctcgggcacctcagggcccccatacctgtgggatcatcctcggaggccaaagtgatggcagcacagggcccgacccccccagttaacccactgagggcccaatcccggggcacccggtgctctggcctgaccttctccttccacccaggtagcacagcgggacgctgcagagaacgagggcagcccggtggctgagcacagaccacagaccagcctgggtttcaatccaggtttggccccacactggctgagtgggtcttcagcaggggcaccctgccccatgcctctgccacagtatctgtgcaatagggacagtaagagcgcacccggcgagggtggctgggatgcctgcagcgcccaggagaaggtgccacacagcccggggctcagcactcgcaggcaccggagcaaggcaccggggtgtctggctcttgctgtatctttattgtcttcatgcctttcctgtccgtgttcattttcttcgaggtaatagatcattccattgaaaatcacctggcggggcaagccacccactcccatcctccccaccccaacccagcgtttcactctgccggctgtgtgtcctgagctgctctaagcaccagcgggtggcttgggcgttttagacactattgccattgtttttgtttttgagatggagttttgctcttgttgcccaggctggagtgcagcggcacgatcttggctcactgcaacccccacctcctgggttcaagcaattctcctgcctcagcctcctgagtagctgggattacaggtgcccaccaccacatctggttaattttttttgtatttttagtagacacagggtttcactatgttggccaggctggtctcaaactcctggccctcaagtgatgcgcccgccttggccccccagagtgctgggattacaggcatgggccaccacgcccgaccatagacactattgcctttgatgggacgggcagcaggtgtagccctccctccacatgtgatagataaagtcatctccctgttgtaatacacagtggcctcagaggagggtatattgtctgagggaggaggggcttccccttcatttagtcaaggacacgtggcctgtggtcccccgatgtcctcctgaagggaagatccccccactccctgtgggatgtgcccccacctctgccgtggcatttcacgacctccatcagcttctggaagcttccagatgccagaggcctcttctccatctcttgttccctgagccgggcatggatgggcccaggtgcctgtggagatggagccacagcagtgacgcccccccacctggtcctcccccaggtctgaaagcttccctggagcgactgcagctggagtacgtggatgtggtgtttgccaaccgcccggaccccaacaccccgatggaaggtaggtggtctgcggcggcgccaccggttaggcctgggcggggtctgaagggtctgaacctggggttgtagaggccgccagcatgggccctgctgggcacccgggtgagccgtgagaggaggccgggtccagggtggggggcgagggggcaggcctcccctcagtagggggtgaactcagcctctggctgcagacccctcgccaggtgcacctggcacctccaggctgagtccctgtcctggctttggacccaggccgatccgccctccgagtcagagccgcagtggaactgtcccctcccctctgcggctgctattttgcagctaagtgaagtcgcagtgtggggactccaactgcggtgttctctccaatcaccatccattgggaagcttggggggacttttttgctctgggggataaattactacatagaggagaagaagcgttcagcgctttgaaaatcggttttggttactttggcgttttttattctttctactcctgcgatctcagccccctccgctcccccatcctcctgctacaggcgtctttccatgtgtgctttgctgctgcagggacttgaaagttaaattgtgttccagttattgttttttatttgttcatatacagcacgcacgtgcgtgtgttgatatatttttttcctttttaactaaacgcgtgttctgcacggtgatttgtgcctccccgctgtgccttcgtcgtgccacgcctctcagtgctcccagctatcaactctggtctctttaaatctttcttctatcaccaggggacccatttagttcctccaagtcaaggacattcatcatagaaggtacacagtgcccccagcctgactattgacttctgtgtccaagctgcattttatgagacagtatttttatttacatgattcttttaccccatgagaaacttctccataaaatgcataaagaggggaaagagcaccctatgagaacaccttgcaagtgaaggaaaagcaaagtggtgttggagcccctcgcccccagccccccatcccctcgttcctccttcctcccgtgcatggcccccacccctgggcttgcactgctgagctccgcggcggccgggggtcctcttgatctgaggatgctgtgatccccacctggagccttgaccctggatggtgccatgggaagggttggggaagaccaggtttccacaaggagcaaagccatcagggaccccaaaacacgcggccccccaccgagtcttagctcctccatggtttatgtttgctaagctcctgtctctcctggaggcagagatcacctggcttgtcacgctgccccgtccacagcacgctgctcctcggacggcatgctggctgcgtgtcccctctcaccaggttgccaaagcgctccatcaacgtggaatcattttcctcctgaaagaataaccacaggagccggcagccttctgaaaccagggggtggcctctggccacgcacagtctctctgccctccccacagctaacggccccaggaccccaccccaagggcaggtgtcgatctccctgggcctgggcccctgtctgccaactggtgctgccacctgaacccccatgtattatttgtgatgcggcaggagatgctgtgagttttggcagcagctagaaggattcagtcttcctacttccgttcaaccccattaaatattgaggtgaaggacagttgtccctaattgtccctgggtctggggccactgatatcacacttgggcacaagtgcagggtgctccctcatgtgggctccctgtccagcctgcttctgcccagatcctccagggagcccaggggcctttgcctaggactccccacctcaggacagccagaggctcctgccccgtcagccccgtctctccatcactgcatggaaggggcgccgcagggcagcatgcggtttcactggctgggaccttggagacctgagacagctgccggggagggagagtgagggaacggggctggccttgggggccttggcttccctctgtctggcatgtggacctaagccttggctgagaagaatcgggaactgatgctgcatgctcacaggtgccccgagagtgtttctaaaaaaccacaaggccgggcaggccaggagcccggacctgggcaggatgtagtcagagattctcctgggaccctctaggttctcctcaaactttcccaaccaggcacttcctgagggtctatcggagttggcagttaaagcaggtggcccagggaggtggcccagagagttcagactccctcccagatctccacccccaggaggggacagagaggattcccaggagctacaacctctgaccttggaagtaagcagagagcagggctgggcctgcaagcgtggaagccaagggtggtttgccaggggtcctgggtgagtctgccgagaccaccactccagaaaccccagtggcctcagctctagcctttaggaggccccaggttctgctcagggtggacctcagtaaaggggcactcagggagcgacccccaaaacagaagtggacgggaagccagcactgccactttgtggcctcgttgccattccaggggggagcctgcagaacaaacccagcatcttccatccttccttccttcccatcagccccactcccagcattttcaggacctcagcttccacgcagcatgggcaaaggacaagcaggcactgagggagagccagggcttttccagggtcaacgttgttgctgtctttagaaacacttgcactcccactcactcccacactgcctttggcggtcgaacttgcaagcactgtatccgacccgtgagaagcctagcgccatagtccctcgccctgcaaagctcagaggcttctgaaatttgaaatttcgacgccaagttctgtttttaaaatcacaatatccccatgaggctgagagggagctataaccagcagattgctgtgtctcaaagccatgtttgaatattgggaagaatccactgtgtcgctggggcgagggtccctcctctcttctttaaaaggccagcgtgaagtctccgcgatttcatcctcagggccttaggagtctccgccgtccacgattcaggttgttcccagggctcatggagcctcaaaactgtcctactccaggccctggcccctcacaggaggagcacccagacccctgtggccctgggaccaccccttgccaggggacaggcgggttgggactctggcctggtgctgggctggtttgagaacctgggccatggtcttacaaggctttccacgcccacttctcagtctcctggacatgacaggaaacatgagctcagccccgaagccctattctccgggaccatatggcgccccaggtcctgccacatctccttatccagcccactctctgttccaattagactttggaatagcccgaagtaggagaccagaaacgcaaaaacacatgtccctcctgccgccaatctgactgtaacgttcatgcattcacctggtccttcctgagtgatcggggccctcgaatcttccccagaccagagaacctccagttctagagtccagagccacattctttgattgtcccctctaatctaccatagaaacatcacggtccatccataacccatttttcaacatttccataggcctgtaaccagtcggggaaattgttttcacgaccaacttctaggattgtggttcacttttctctttcatcccaaaaaacccctcccacacccaacttcagagccaggaagtacactgcttgcaagacatcttcgcagcccctgtccctcctcccagcgtcctgcctgtatttgcagaatgtcccgaggctggccctgagccctggctgccccccacctgcggtttccctttctctcacgacagagaccgtccgcgccatgacccacgtcatcaaccaggggatggccatgtactggggcacgtcacgctggagctccatggagatcatggtacggtggccgcgcagcatgtgtgtgtccaggcacagactcccggcaccggctgcgtatggagaccccaaagctctggcggggtctgtgcctttggtcccaactgcaccgatgcctgggtgctaagggagggacaggatggtggagtgtggtggttatgtctgtaggccttgcagacggggattctgcatggatcccagcgctgtgtggccctggacaaatggcttaacgtctctgagcttgtttccccacctgtagaacacatctgctaggtgagcccccatggggccattctaaggagtccctgagagagccagtgtgaagctcttagcagatgccctggagctcagcaagcactctggggtgacaacaccgtcagctgtttccactgggctcctgagacgtgcccggtgctgttagggtcaagggttccacagggaccctctcacatgcaatcctcaccggtgcctttaccaggtgagtgccgcaggcagcccatttttcagatgtggacactgtggcacagagaggttcagtaacatgccaaggtcacacagcttgggccaagattaacatccaggctgtgtggttcagagcctgggctgctcataactggaccctccggcctgggggtcccaccacccacctccttttcccagctcaccagggcctgcctggctcccagggaagctatgagtgtgagcagtggggagcccgggctgcagctgctgggccagcctgctccggggacaccttggtgccctctccatggctgccccggcagcctcccgcctgctcacaggcaagggccctcggggtccctttctgccttcacaggaggcctactccgtggcccggcagttcaacctgaccccgcccatctgcgagcaggctgagtaccacatgttccagcgtgagaaagtggaggtgcagctgccggagctgttccacaagataggtgggcaccctcgggcccctcgccccgccccaccccacccctgctctcgggcccagggcttgactccacctgcttttcctcttcaggagtgggcgccatgacctggtcccctctggcctgtggcattgtttctggcaagtacgacagtggcatcccaccctactcaagagcctccttgaaggtgaaggaacagcctggtggggagggacgggcaggggataggcattttggacgggtgggacctttgggccgactgctttggtgctgggcaggggttccgggagctgcagctgttcccacctcggtctgctgggggcgggctccttggcgtgagaacatggagcccctcctggcctgatcccatgtgtagaggggctgcccagcctgtggcacaggcccaagtggagaggccctttcacatccccccccctgcccccaccacatccccccatctctaccccctaccacatcccccacctctgccccccaccacagcccagcattcagaactctgagacccctgggcctgggctccgagatgggggctgcaaagccacatggaggtgaccctgggagaggcgcccctccccaccacacaacctctgagtggggactcaggagggtccccagactgcaggatctggagaacaaggagcaggccaagaaagtctgcccagccagcagtctcagcactggggcccacagccctgggttccagggcaacgtggcctggcccccgactcctcccatcccatggcaaggtcagggcccccctccaggaggccctgcaatcctctgggggggatggccaggggagagagcactcccctagggccaggaggttcttctgggccacgggtggcagccgagaccccaggctgccaagtttcctaagagaaggaaggccagcacctcgcctccttgtcctgacttggggttgggccagcaccacagtctttgcacttcagagcctggacaggccccgctcatccaccagcccgtgcccggcccactgcccactctcccctacttgagaggcctggggcaggggcactgccctggcttcaagatgagaagagcccctatgagggagaagggtccagaaggaatgagcccatcggccccctgcacgtgggggtccaggtgacctgctctcatctgtagctgtgctgctcccctcccccgcaaccagggctaccagtggctgaaggacaagatcctcagtgaggagggccggcgccagcaagccaagctgaaggagctgcaggccatcgccgagcgcctgggctgcaccctgccccagctggccataggtaacggtggggtcgccatggggccagtgcccctggggagaacctgccccagctggccgtaggtaacagggtggggttgccatggggccagtgtctccggggagagagggaagggatccctggacatcatcccccagccagcctcgggtaatcgggctctaaggggcatggttgggaccccatgcctctagggggatgtcaggagtccctgaggacctgggccaccccctccatctgccagccataggtaatggggctcccgctttcatgggaagaggatggggagcgctaagcacttgggccacctctccatcagggagcagcgggctcccccatgcctcctccagccacctcttagacaaagcccgtgcccagcactgcagggcttcctagaccccctcagacccccagaccaagatgctgggtctctcggcccagtcagaggcaaggcagacccatcaggggcccctgtggtgggtgtttctccctcaccttgggtctcgccgccacagcctggtgcctgaggaatgagggagtcagctccgtgctcctgggggcctccaatgcggaccagctcatggagaacattggggcaatacaggtaagagtgagaggccctgctgggcagagggcccatcccagcccgagccccgtccagtgcatcctcccaggctcgtcctgcgtgccaggctctgttctaggcactcaggatgcgcccgtgaaccatcagagttgtgctcctggagagcttgctttccagcaggaacagacatgaacactaactgcacgaaacaaggaggttagaatgtgtgtcagggtggacgagcgctgtaggagagaagccagagataaagggagggagctggggccagggacggtggcgctgcagactcaggttcaagggggcctgtcaggtgggcttgttgagaaggtggtgcttgagcagtcttgagagatgcggagtaagtcacgcaaatgcctgcgggaagaaccttccaccagcaggaagagttgatgcaaaggcccaaaaaggcctggagcagaggggcagatcctgagaggcacgaaacacctccagggacttctgagtgagacgggagccgtggcaaaattgtgggcagaggagggcgagctgcagctcagcctggaaagggaggctgctctccggctgctccatcggggaggctttgggaagcaaaagtcgaagcagagagccctggtgggaagtggcagctgcgggtccgagacgggagtggtggttggatcctggatgtttgggaaggtggggcccccgggactggctgacaaactggatgtgggggtgagaaggcgaggtggaagtcggtccccgggtgtgtcacccggaagggtggcggtgctgtatgctgaggcaggcgcagctggaaaaagcagtcacggacatggaagtccagcatttggcctggagtttccattttatgtcactgctgccaccacccttcaggaaggttctagggcaccttgacatttgagagggagtgcacagacccaggcatgcttcctctctgccccaaaccttctgaaacacaaaagcagcgtggcctccatctgcctcagatggagcccagatgtgatggggcaacccgggcctggccagccgaccatctggaagagcctggccccacctcctccccaggccaggcccgtcttgttggtgggattctgatttgttgttgttcttgcacgcaggtccttccgaaactgtcatcttccattatccacgagattgatagtattttgggcaataaaccctacagcaaaaaggactacagatcctaagccgcccccgcccgcctgctcggacagtttccgttccctcctagtctctgttcgctcgcttaagctgttttgaagccaagtgaagagtgtggtttgcatccaagagaaaacaccacactgtgatgtcatcgggaaatgatctcccaagtcgctgccagacaccacccactgcttcgccggacaatgtcgaagtccagtctgtgccggggaaggcactggttaggaaggatgttcaaacggtcccacccaagcctgtcacctctgctcatcctccaagaccacccagctttctcccagccacagccaagattcccaaagtcaaggcccaaagatttccaaggttcccaaagtcaaggccaggccaaggcctggttgggtccttggggcgggcagggccagcctctcctctgctgagaatccccacttggtgtagggggagaggggaaaggggtctggcccatcgaggggccccttctgccagggccttggttgctggggcagggcctccccactgggggtcttcctccacctcccactttccaagggctccaggaatctggggcctgaccacagattcctctcccatccttttctgctccaacctgccccactgggtcccggcaggggccatgcctaccaagctcgagctggcccttgacccccacccacccccacccttgctggcaggggcagggaccccagggggattgactctgcagtttgggagccacaaaaagcgtagcggtgtgatttctagctcagcctcccaccgtcttcctcctacacaccaatgatgagcctcatgccagtgaggcccggagcgcttgggaggggtcccagtggggcaggcccctctgtctggccacccctctgtcctggccccggaaggccctgtggtcatgtgctcctagctgcacggtggctgctggccacaccacggcaagtggcagcaggggccggccctgtgcacaaggatgcactcctctcggcccctgtagactttctctaaagccgcccgccagcccaggccgctgctctgcaccgagctggtgggcttgggttttgtggagcgcatgcttggaccctttcagtaaggaagggtctttggggttttctgtgcccatgacttgggggctgcacccccacagcacccccacaatgtaggaaaagacctcagggaacctctccctggaaagacgggcagggctggttagcccctcccactgcctgacacctgggacaggctgggcagaggggagagagggcaggacaggccagagtgacgcccccgtgcagcttgggccggagggcaagggatgccagtaagtctgcaggtgcggggtgccacctacaggcccaggcctgtgtcccaagcagtacccaggctttgcagaccacgcggggcagggctccactgaagccacccccacccctcgccagctagctccatagggaagcctgtgtctcctgcccccagggcgcaccctcagtgcaggcacctctgttcccgctttgcccctggaggagccactattccagaaggctccaccctgccgtcctgcgggagcctgctgtccagtcctggccgggccaaggcctgggaaactgtgaaagtcagaaaggccagcggggagaggctggggcgaggggaggagggggatcagcttctgctattaccgaccccccttcatgctgcccctggcgcctagaacccttgcccctcctcatagaccaagtcccgggggtctccactcagtcctgctgcctgcttcaccagaagcagccctgtgagtgtggggtggggaagtcccttcccaacggaggtcccagcctatggccctgggcccaggtgggggtcgcctgcttccttcccggacagggtcctgcagtggccaatggtgccagagggcaggtggcccaccctcgccatcagggagggtggctggccccatccccactgccacccagccccacccactgttggaagagggaccagcgcgaggtggtgcccagggtgggcactgctgcttaatgcgaggcacacctggggcagctgagcccccaaaggctgcgggtttgccaaacacagagaggccaggccccagtgtcaggatgcagtcagcctctggcgcagctctttccacgacctggttcctggatgtcctgcttgctccacacccatctacagggaggatgtgagggggctctgcctcctagggccaggtcccccctctcgggaggaggtattgggtaggaccatccaagaaagggcagaagaccaagggcagtcggggtctagaaaggagggcgctggccctgctggacgcttcggagcccccactgtttcccactcagctttgtgctcagatcccaggtcccaaggagtgacaggggcttcctcccaccttctgtccttgtccagtcatgtaaataatgtgctttttctctccccgagtctttttttttaaacctaccgtggttcctcagctaactgcattccctacccaggcagagactgtcctatgcctcgagcttccaaacgagactcagaccgcgacacagccaccgtatttatggaatgacaaaataaataaagcccaaacccatcggtctctgtgactttttgctcctctcatttcctcagggtcagggctgggccagggtgacacgggaggggaggaaaaggctgccagcagcagggcctggggcatcccccaaaccggagcctgcagccaagggcaggtgggttggaaagggcccgtggagagagagcggggacagagaatggggacagggtggtcagaagacctgtcccccatctctcccaagcgattcagccaagggagggtgcgtgcctcccctgccgcccccaacacacacattctctttcaccaactctgagggcccaaagctgcttgctgggaggctgctgtccctctggggacctggctggctgctgttctcataaggacagaggtccaggcctggggaagctctcatggtatgtgtttggggtacaggtgagaggggcctcaccccagcacacccctgtttcgggctcccctccttcccagtgagcccctgcacccgtgaaatgaccatcccaggcaagagaaggcttccggacacgcccccaccccccaccactcctccctggccccagcccccacccccattctaaatcttgaatcttaaaaagaaaaagcctctgattaaatcctttcccaaaggatttattaaaacacagaaaaccaaaacatacacacagagtacaaagtaaaggtgattgtgttggctacagcctctgtccagcctcccgtgggcgaagaccagacaagccacggctcacaggggagcctggcttccaaagctggacccgcccccgccggggccaccctggctgggactcctggcgcgccttgcacccagcccagggccctccctttgccagcctggggctgtgcctggggaaaggggtcggccccctcttagctgggcctgggccggtggagtctgctccctccacacccctgaactcagaccccacgggccagtggggaccctcccttcctctccaggggtgcttgggctccaatcgctgcttgaggagttcaggacacacacacacacccaacgggccctttctgggttatcgcacctaaaaaaatactttgtttaaaaaaaaaatctgaaaattaaagaaaaaaaaaacacaacgccagtgagtttgggctgatgcaccacaacctgtaaactttcagacacagaaaacaggacaggaaccagctgccgaggccgaggcgggccttgcacagaagagacttgggggaggggccgaggccaggtcaccaagacggtgagggcagaggggcgtgccagcctcggcccccacccacgccctgtcccctgcccacagaccctgacgcacactggaggctccaagtgaccgacacttgaccaagtccatctggcttctggctcccatgtacccgagcccactctccactccacctccttgggcctcaagtgtcctgggatgacaggagtgagggctgcaggtgtcaccgggccaaggcttggtcagctcctgacctcggcaggggagcacccgggggactc

SEQ ID NO: 294 - DNA, 114985 bp, Homo sapiens
  source 1..114985: mol_type = genomic DNA
agactatattattattattattattttttacagatagcatcagctctaaaaatatctgaattggaaatcacaactatttacttttatcaaaaagcatttgtttttttccctgaattttcacatttgtgctgatggtggacattaatggtgatgaaaacaaagaagagacatgtgagatggtcggcggagaactgtcccacagtcattcctcaagaggcccccagctcagactgcgtgttcagcaaagtgttttgggagtgctgcttcctctgcctggcacgggatgacctcacactctccctgcccctaagtccctttgcagttgctgcgcgaatactctgaagatacctaggaagagtgacgttctcgttttctctgttaatgcggcaaagaacaggactgcaccctcttggggggatctacagtctctggagatgctgagaagtgttatgaattgggtttgtatacagcagagaagacatatttttaagggtggtggaatgatcccatctcatcatatgtgtggcaggtggctcaaccttatgccttatgtatgaagagcaggcagaacagctccatgatatttgtgtactgagaggtggatcatgccattgtactaacaggcagaccagcaacagatgatattgagacttaagactaggtgaaccaataccatatctttcttccactgggaagacatatgcctgttactgtattgaggatagacagaactacactattgtacttgggacatcatccatcaacattacattaagagaacaacattgttccattgtactacagacaggcagaccaataacatgtcatctttactgacaggtgagccaacactatagcattgtattcatcagtggttcaacctaatgccactgtactgaggaatggccaacaacaccatgctgttggactaaaagcaggcaggacaatgccaggtcatcaaacgaggacaggaaaaccaacaccaagaaatacaccagaaccactcaggatgcacacaaatacttattgcttttgtctgtactggctgcatcgatggctgcaggaaggagagttgagcttttagtacagacagtgacactgaaaaaccaatagctggttgacaagaaagagaacagagtaaaacacccaatgtccaactgtcactgtgtccttttgagatgtgcatgtctcctgtatacttgacttcatgagaggccccacccaaggggcaagaacccctcctgacccatgagggttaagggaaggtttcagaggggcagggaaggagcccacagactttgatatggcagacagtaataccagcacaatattacccatgctggccagaaatgggcaggtagcaacaatccaactacagtcccaacaattgggctatgggaaatagtgcttattttaaagtgcaagatgttgacactgtccctggcagaacctatttttgaaaaacataaagtgctttttattttaacttttttttttttaacttgaaaaccacagaaaacaaaacagaatttctattatagtaggtactttccttgctgcagcaggaattattcagtctgaactgggcatttcaatgcgtggtatttttttcctttcatttttgcaagtaaaaaaatcatatttttatgctgttcttcagtaacacacagtctctttgaataaactatttcttttgcatatttgacacttgcatatcttttgagtctacactagtgatgtaaagaaagcgtgttcctcctccaaccctaaaacaatgctctgagttcatgctgttggctgggtgcccaccttctgaacccttcccagattgccagggggcaattagaattgagtacaagtggtgcaactcaccctgatggtatctcaaaataaaatctcaggtactatgaaataccgaagtcaatgaagacatttgagtaagggttttgcgctgggatcgtggcttatggcgcagagacttccccatgaccaatcattccctgtagctgtctaacagtggaatccatccaggaggtgatggacaggtgttcctaggggtggctgggcaacattcaataccaaattggtcaacccactctttcaacaccagccgcttgttccagcatccttctctagctgaagccaggaggactgtcaatgttgccctccgaggctgagatggaaagccacgagagaatggggagtatgtggcctcggtcctgtctaaagtggtggtagtggtggctgtgagttccactcatgtcatctcccaaagagggctatagagttgttacaaggaggtgctgtgccctatggcttggccaacttcatgctgatggacctgtcatggctctcaaggtcttagggagccttctctggagtctctcttctctctgagggctttacagggcctttctgttccagagttcatgcagaaaagctctgtggcaggtaagctgaacagctctcctctttggacctcacccaaaagtctctcctccaaggcagggcagttcagatgctctgatctcgtgtgcttccatgggctcctccccctggcaacacacggacgtcaggggagatgtggttctcaagtttgcacttttcctgaccactggggccttttccagtcaatgcttctgtggagtaaatacagttctgccttaagaacttaggggaggtgggtaaaggggagctttcaaagtggtttttctccgatcttgtccccgtgctgaacttcggactggtgctcccagggaggcttttgggggggctggagtccacactgtagagcagctgtccctcatcatctgtgtctgcgtcaatgtactggtggacacccgcctcaaagttgaacgctattgctgtgtgtttctcaggagaccgggggggtgtcttagcacttgctgtggtgtagatggaggactctgggctcagcacagccttgtccaaaagcgtggcacactccagtccagcgacagcagccgcagcactcccccggttcctgagagggtcatggtacatccctagaacggggaggagtggactggggtcaccctccatgaagttgactttaagtgctcggagcttcaaagggttgttagttttcatggaactcttggggctctcgatgaagaaactagagtgctggctggcatcagggctggggttggcctccacaaacctaccaccactggcacccagagctccccgccagcccacttctggggctgtgctgcccccagtcttgctggggagtgatgtcaaagggctgtgggagaatctggtggcctcagggaagtctgtggcacagctaatgaaactatcaatgcttgacatacttcgcatgtcaatgaccccttctgtgcgagtgggcagaggggctacggggctggggatactctccatttcaagttcttcctttggtttgctctgtgctgctgactccttggtattgaggatgggttgggattgggtcttggccatcttattgtacatgtcttccaactgctgaacgttcaggtgctgaggactagaagacgatctggctttttcaggggatccctgttccttggtttcaaaggacttacttgagctggtttcagacagtgtcctctttgtccatttccatttgttaggagacaagtggttatcttgtactttgtctttcttacccatattctccccatttttctcaaccacaatgtccatcatctcaatgctccgggcaaaagcatccttcatgttcatggatacgatgctgccattcctcttggctctctccagagcctctcgccgtttgattgctttctcctgtctcttctgctccttatagaactcagagaagttattgacgatgatggggatgggaagagcaatcaccaggactcctgcaatgcagcagagtcccccaacaattttccccaggagagtcttggggtagatgtctccatacccaacagtagtcatggtgatggtggcccaccagaaagaggctgggatgcttttgaacttggtgtcgtcctcatccttctcagcaaagaagacaaggctggagaagatcataatgcccatggcaaggaagaggatgagcaagcccaactcattgtagctcctccgcaaagtgaagcccagagactggaggccagtggagtggcgtgcaagcttaaggatgcggagaattcgcatgatgcggaagatctggaccacgcggcggacattctggaattgcagcacgctcttgttggattcggtgaggaaaatggtgacatagtatggcagaatggccaacaagtcaatggcattgagtgggcccttgaagaacttccacttcttgggcgaggagaggaacctcagcaggtactccatggtgaaccatgcgatgcacacggcctccacgtgggccagctgggggttgtctgtggactggccgaactcatcgaggctctgtagctcaggcagcgtgttgagggacagggcaatggtggagaggacgatgaacatgatggaaattatggcaaggatctgtgaggagaagagagtgggatttagttatcaaccaccccacaggatgatcatcataatatcctggatctacagggcactcctcaatgttcaagagcattttcacatttcactagtcatttaatgagccaaaaagagaatttgttgtaatccatttattgtctagatgtggaaaccaaggcccagagaaatgaaatgttttaaagctatcagcaagcccagggttcaagcatactttttcagatagtaaccattttataggccctgaaaccctgcattgtctgtcacaacgactcgactctgcagctgtagcataaaaccaaccttggataatacatacatgaatgggcatagctgtgtttcaataaaactttatttacaaaaataggcagtggactgaatttggcctgtgaaccatgatttgctgacttctgatctagaccagtggctcacactggatggggaactaccttcacagagatgatactaatgataataactatccttgattgagtgttcattgtgtgctaggcactttccatgaaatagctcatttcattcttataataaccccgttcagtgctattagctccattgaacagatgcggacacttgggtttccacagctagtaagtggaagagccagcattttaacccaggtctgtgtgacccaagaacatgagctcttaaggctgtgttaaaaatcagatttggctgggtatggtgcctcatgtctgtaatcccagcactttgggagacctaggcaggaggatcgtttgaggccaggagttcgagtctagcctgggcaacatagtgagactctgtctctatagaagaacaaaggggaaaaaaatcagatgaaagctaaccttttgctagaaaaatgcctagacactcaagattttgcaggtaattcctagggaggcacagacattctgggcccatgttaactcctgattggaactatgtgcttttgggggctaaagaccttggcttaactacctttgagtcccctggatcaagaagagagcttggcccagagaaagggctcaatggatatatgttgaaattaatggaatctaggccagtaggccagtctacagactatgcagaaaagcaaacagatgtaatcaattgctctgagggtcttttttttttttttcaaaaatacaaatccaatcacattactcctttgtttaataaatctccagggctcctcatgaaaaaatccaaacccctaaacctgtctattgggtcccctatacctgtcttgcttttgtagattttccctttctcttcctctgcccctgctaagtgggaaggggggggcctggtcaccatggttgtatcatttgatcctgcctgccaatgatcagagcatgaagtttggataaaaaaatccaagttaagccaatccgtacactggggcttagccagcctacctttgagaaatttgagttcaggaacccaggcggtgagtgggttacgggagggtaagtccctgaattaaatgttaagtagaatctaggcttgaatcagcttcatgataagcccaaccctcaagcaactgtctcccaaatgtaggggacagagatgccataaaaacatcagagaaagctgagccttagcctagacatggtggcttacatttgtaatcccaacactttgggaggctaaggtggggggattgcttgagcccaggagttcgagaccagcctgggcaacacagtgagaccccgtctctacaaaaaataaaaaaatctgctgggtgtattggcacatgtctatagtcccagctacttggaaggctgaggcgggagaatctcttgagcccaaggaggttgaggctgtggtgagccatgaccacaccactgcactccagcctgggtgacagagagagaaaccctgtcttgaaagaaaacaaaagaaaagaaaaaggaaaaaaaaaaaagaaacgaaattagccgggcatagtggcggcacctgtattcccagctacttggcaggtgaggcaggagaatggcttgaacccggcaggcagaggttgcagtgagccgagattgcacgactgcgctccagcctgggcgacagagtgagattccatctcaaaaaacaaacaaacaaacaaacaaacaaacgaaagaaaaagacaaagaaagctgaaccttcaagagaagccagagaatgaagggaaggtgcagatgaaggaggagtggggaccgcaggagggtcatagcagggtgccgagggcagcagttaagagctgaggctctggtgtcagcctgtttgaggttcaagcctcagctctgccatttccttacattgagcatgttatttaacctctctaagccccagtttcctcatctagcaaatgggctgataataacagtatctacctcagagaactgctgtgaagatgaaatgtgttagcacaggcaaagtgctaggacagcttccagcagcacacggtgagtgtctaatagatgccagctgtcatcacaggggaaatctcagcccacatcaccccacccactcagatcaccagcctcggggtggcccggtctcggtctttgcctcctgtccttgttctgagactgtctgctgtatcctgtaagtcaacccaattgctacatgggtgagtgtgggaggtttctggccctgcaatgaatccccagtaaggacacttggttgtcaagtccttctcattttgactctgacctctctctctggccactcctgccatcggttctcaaaattcacactcctctagccgcacactatcattggtcaattctgcatgtccgagcttcttgcttgctgtctggtgaactccaatccatcttttcaaatccagcccatgtgaccccttccctttggagttctccctgctttccccaggcagggttgactgctccatccttgggtttcctcaccattttaccataccttggggatacttaccactcatatcccatcacaggtgcgtgcgtgtgtgtgtgtgcatgcgtgtgtgtgtgtgcacgtgagtgagtgtgcttattgctgcccagaattggtgagtactgggaggatggggatgggttctgaggtttatctatgtgcccccagcacctaacccagggtgggacacctgacaggtgctcaccaagtatttgttggccgttgctcaagttcatggagttagaagtagaagggtcagtaccagaattcaggtttttttttttttttttttagagacagtatctttctctgttgcccaagctagagtgcaagggtgtgatcatagcttactgcagcctcaaactcccatgctcaagcaattctcccacctcagcctcccaagtagctaggaatacaggagagcacaaccaagcccaactaatttttaaccttttttgtaacgatgggatctcactttgttgcccaggctggtctcgaactcctgggctcaagctgtcctcctgccttggcctcccaaagcactgggattacaggtgtgagccactgcactggcctgggaaatatttcttggtcatctactctgcgtgaggcactaggccagacattggggatgccacagggggcaagagagtgccagtgccctgatgggccagctctgaagatgaaagggaatgttccaaggtgtggtgcctccccagcctcaggggttccataacttctgatttttttgctatagttaagtctgacacatcctatgtttaaaaaaaaataggtttgagtttcttgatttgcacccattgaaaaaggaagattctgtaatactttataaatgaaatgtttgaggcagggtgcagtagctcaaacctgtaatcccagcactttgggaggctgagacaggtggatcacctgaggtcaggagtgcaagaccagcctggccaatgtggtgaaaccccgtctctactaaaaatacaaaaaaattagccaggtgtggtggcaggcgcctgtaatcccaactactcgggaggctgaggctggaaaattgcttgaacccgggaggtgggggtggcagtgagctgagatcatgccattgcactccagcctgggcaacaagagtgaaactctgtctgaaaaataaaataaagaaaataaaatgtttgatatatacaaaaatagacctaatttatatataatttatgaaccataatcaaatgaacacctagaacccgccacccaaatggagagacagagcaggcagcagtaacactgacacttcctttgtgtctttcccactccagagataacctctgtgtgcagtttttcgtccctttgtttctctgtatgattttcaataagaatatatgggtccctaaattgtcattttgttgcgtttttttttttttttttttttttttttttaagaggtagagtctcactctgtggcccaggctggagtgcagtggtgcaatcacagctcgaatacctaggttcaaacgatcctcctgctttagcctccgaggtaacttggactacaggtgcatgctaccatgcctggctatattttgtagagatggggtctcactatgttgcccaggctggtcttgaactcctggcctcaagcaatcctcccaccagggcccccaaagtgctaggattacaagcgtgagccaccgcacctggactttgctcagttttgacgttatactgtatgtattttgctacttgtatcactctttccttaatggtaaaaacaaaaaatcaaaaaagcccactcaccttctttattttattttagctttattctaagaaatcatatgcaaaattgctgatttttcatgccagggctatatgtattaaatattcaccaaaataaatatgtaattgttggaataacatcttggcagcacactttttggtgctcctgtgttgagctgaggagtgtgggtcctggagttgaaattctagctcttgccattcattggtggaatggccttgggcatccaaatgttcactgcctcagtttccttatttgtaaaatgaggacatactagtggtttttaaggggatgatttttactcctgggggacacttggcaattttggcagaaatttttggtcgttacaactggtgggaggggtgctcctgacatcttgggggtggaggtctgggatgtcactaaatgccctacaatgcacaggacagctcccacggcaaagaatgatctagcctgaaatgccatcagtactgagattgagaaactctgggacatgccaatagtcagcccctcacaattgtggagttggggacacagagtgggtcagagtgggcagccagtgggctttgggctgagccctacaggaagctgctctcgtctggtgacttctggcaggagggcgcctgcacagggaggaatgggttccctgggagtctgttcctttaagagctgggcagtcttattttcccccaaaggctagcaggggaagcctgctttggtttctaacccccagacaactccagggaaggcccacataattgatgttctggcgacagatgcatgaattatgcacccagctattgtacagacctaaagcaggcaccccttttgtacttgagactgtgccctccctctccccttccctcagcccaaggaagcctaggaaacgagcaaagcagggggaggggctccactggactccaaggtggagggtgtgggggagtgcctgctgctcagggttgggttgggagggtcagagcacacctgccatcggtctgtgtgaatgtgcatcacacagcgtatgcggtaatgcagtgtggggggtctcccctgccccacccctcctgaccccacctgcaagaactttttctttcccagactcagtgaggcccttagaatcagggccacacttcctgcctggggaacttcccaacgtgatttaagccctctgtgcctcagtttccctatatgtaagacagggatcattgcaagactgcaatgaaaattcattgaactcaaaatgcccttagctagtggcacaatcactttaaactttaattgtatttatttctccacatttctttacatttatttatagctggttttggacttgagtttgagtcccaaggctattattccccagctgtgtggctttggacaagccactccccctctctgagcctctatttccttttctctgaaatgaagatgaaggtaactgagtactcacctaaaagccacttaatatataatgttattaaattattattcagggccgggtgtggtggctcacgcctgtaatcccagcactttgggaggccgaggtgggcagatcacctgaggagttcgaaaccagcctggccaacatggtgaaacccatctctactaaatatacacaaattagccgggtgtggtggtgggtgcctttaatcccagctacttgggaggctgaggcaggagaatcgcttgaacccgggaggcggaggttgcagtgagccaagattgagccactgcactccagcctgggcgacaagagggaaactctgtctcaaataaataaattattattcaggtaatttatggtcaaccccatccctaacctctgtactggttgcttttggaagccaggagtagctgtgtagaccccagtgactgcctaaggcagcgtgcgtcctctaaacagctcgtggacccagatggactgtgttgatttggtttctgggataagccccaggaatggggaactgactaccacctgggagtcctcccagccccagctcaggcctggacaggcctctgcttttctgggatctgagcccagttgggcttggcagaactccaggaacccggggagcagaggcaggagccagctccagagactgggaggctgtccccaaattccctgtgaagaggttctggatcctggagcctacctgtctgcaccaaatgggagagggggctttggtcctctgggggaagagattggcaggtggggatccccagggtggaattcaggagtgctggagccaggccctcctcatcctaatcgtcggctctggtggttaatcacagagaggcctacggactgtttatcgtggcctctgcacacttccctgctgttccaggaatgtggatgaggcacagactgtccatgcagaaaagggctcaagcttcctgctgggaagatggggaaactcaagcagagaacggaagtgacttgcccacggtcacacagcccattgctgtcaacactgttcagtaacactagaagctttggcaagctggaagctgcacctagtgtttagggcttgcaaattgctcttcgtaaacatgcaggtttatagctgcagtattcataatagccccacagtggaaacaaccccaatgtccgtcaactgatgaatggataaacgaaatgcagctatccatacaatggaatattcttcatccataaaaaggaatgaagtgctgatatatgctacaacacagacgaaccatgaaaacattatgataagtgagagaagtcagacacaaaaagccacttattatatgattccatttatatgaaatgttcagataaagcaaatctatagagacagaaagtaggttagtggttgccagggtgggggatagggattaacagttaatgatcataaaggacgtcgtgttctaaaaactgacttagggcaaagcctgcacgatttggtaaaatttaataaaaattatcaaattgtatgctggaaatgggtgtgcattatatgatacataaagtaagcctcgataaagttatataaaaagttgctttccataaagggcagcccattgctattgcttttcttttcttttttctttctttctttttttttttttttttttttgagacggagtcttgctctgtagccgaggctggagtgcagtatcgcgatcacgactcactgcaacctccgcctcccgggttcaagcgattcttgtgcctcagcctcctgagtagctgggattacaggccaccacgtccagctaatttttatatttttagtagagacagagtttcaccatgttagccagactggtcttgaacccctgacctcatgtcatccacccgccttggcctctcaaagtgttgggattacaggtgtgaaccaccgcaccgggcctttttttttcttttgagacaggatctcactctgttgcccaggctggggtgcagggatgtgatcttggctcaccgcagcctcaacctccctttttgtattttttgtagagatggggttttgccacattgcccatgtcagcccattgctttccatccccacaacatatggatagttcataggagagaagaagctgagcaagccacagagctgctgtaagccctgcagcgactccccattctcccagttaagttccagttcctgtgcctttagttggcatgtgcttattgagcacttcctaagtgctatgctagttgctgagggtgctgcatgaataaggaagaaaatttcctagcctcatggagctagcagggagaggcagaccaaaaaaacccaaaaacgtaaaccaggaaagaggcaaggtgatgtcagatagtgttagatgctgtgagttattgagaaaagcaaaccagggggatcgatgcagaagcactaggggtgtccacgggaggcagagtggtcagggcaggcctctcttaggaggtgtctcgttgctgagacttaaaaataagaagtgtgtgtcattcaaagatgcgaacattctaggcagaaggcacggcacgtatgaaagccttgggtgggaataagcctggtatatcaagcaacccaaagaagctcagcatggctggggctgcatgagcgagagcgggagagcggggtgggcctgatgagacctgatgaagagatctgggttttatattaagatcccttttcttctctctcctgaccatttcccctatttcccattgtaacccacactgaatcctgcagaaaccacttaaagttcccaaactcaccaccatgggtgcttccacctctagatctttgctgttccctctgcctggagtacccttcctcctactccaaacccacttctcctggctggttcctactgcctattcaggcctcagctttggggccacttgccccagcgagccctctctgggcccccggtctgcattaggtacatcagttctctgagctcacacagcccctgcgcatctctgatcacagccctggtgctgctgagctgaaactgttttctcctttctgtcccacactaaagtgtcacctccatgagggcccgaactgggtcggtcttgtccagtgctgtgtcctcagctcctgaaacagtgcttggtacagatgggagctttctatatagctgacaaatgaatgaacaagtgaataaagaaaatggaggctgagagaatgaagtgacttttccagagtctcgcaacttgtaagcggtggttccagacccatggacttgatctcaggtctgtgggtctcccaagacgttttcaaggacgtaggaggaggcggctgctggcccatcaaaccttcggtccttttatggtgcttccgcttcccccagctttaaggggggattacagctggggagttttaattagaagggtcactggtgcagatccgattaaggggattgggagcaggctgatggggttgcccgcatcccctacaggcagggaggggtccctggcagaggattggtaagacattggagtcagaagcctgcagggggcgctcgtgggcacaaagggacaggaatcctgtgcgtgtacaacaaaggatgaaagcagagggctttgccatgagaagaaaacagtcacaaagatggaaagaggatggagggccactgtggagggcgccctagcccttataacccagaggctttgctgctgggaagtttatttttacttggttgaccgagtttcaaaattgggagattttacataaaaatccagattttcacattcttttggaaaattagatgctcgtcttcactcaacctgcattcccagtggcaaccactggctagagctaaggaacagcaaccccttgggagagtgaaccagctccctagtgtgccacaggcccttcacctgttttgtgatctgtctctgcaggcagctgggtttgcagtcactgacccacctgaggcgataatgaagacaacacctgccatagggtatgaagaactttccagacaagatctgcatcagactccacaagccaggaacatgggggtcacacttgctataccctgccctatccccatacccagggatcaggagacaggagcctgcagggggcaggctaagagctaagaaggataagtaggaagtaaccatgcagagtgaagggaaaagcattccaggcgaaaggaacagtgtgggaaaggccccatggcaagaagatagtggttgctaagtctgatcaattcaagttcaccaacatctgcgcatctgttccattctctccacctgcacagtccccaccctcccgcatcaggacttctttctggcctccccaaaaccactctctggcccactattgcaaagaccactagctgtcaccaacatctattcttcccctcttccattgtcacagagttttagctggacccagggctgcccagaataaagactacatttcccagcttcccttgcagttagatgtggccatgtgattaacattggccaatggaaggtgagcagaaataatagaagccctgtctccttttcctccttgctggctggcaggcagatgtgctgggcagagctggagcaactgtcttggatctgagatggaagcgaatctcagtgctagactggccctttatggaaaaagtttgccagctcctggtctatctcatgacatccatcttgttgaagccactcactgtattttggggtctcattgttacagccgcttagtctctccctgcctgactaactctccagccttctcttgttccatgctcttctctgccccctcatctcaggtacattaaccagtaaccttcctttggtcgttcatagtcttcactatcttcttgccacgggacctttcccacactgttccctccacccggagtgcttttcccttcactctgcctggttacttcctactcatccttcttagctcaagatcacctgttcaaggaagccatccttgactttcctgaccaagtcaaatcccaatcacagactctcatagtactattatccttctcctcataacactgttcaagttgcaattttgcagtaatgtccacctctgcagactgtaagcagtgtgagggcaggggttatatctgatttttctcaatcttgaatccttagagcacatagttggtgctcaatacatatctatggaacaaaggatctcatttcatcctgataacaatcctacaggctgtgctgtgcctccacctgttttataattggggaaactgaggcttaagaacaaatgtccagaggaacaattaagaaaatagtagatggccaggcatggtggtgcaggcctgtaatcccagcactttgggaggccgagttgggcagatcacttgaggtcaggagtttgagaccagcctggccaacaaggtgaaaccttgtctttactaaaaatacaaaaattagtcaggtgtgttggcacatgcctgtaatcccagctactcaggaggctgaggcaggagaatcgcttgaacccgggaggcagagtagtgagccgagatcatgccactgtactctagcctgggcaacagagcaaaactctgtcaaaaaaaaaaaaaaaaaaaaaaaaaaagaagaagaagaagaagaagaaagtagtagagagagagtttaaactgatgtatactagactttgatgcccttctttattttaaaaaatatacatacctgggacctttcttatcctagtatcctggggtctggtttttaacttatgccttcacttgaaccgtctctctgaggtaactgcactcttcttaacaagctctgggttgggcaacctcttcctaacaggccagccaggttcccacaagcctctccaaaggcaggaattctgggagatggtgatgtcaccatctcctgccaacctgaggacaatggtctctggtggaggaggaagagggactcaaaactgatccctgcagagggaagaggggatgaagaggcttgtttctgaaggggagaaatgcgagacagtgtgctccctgcctgggtggttgccaattccctatatttgctgaggacatgagcaggtgggggaggaactgtcagtgttaaccgtgatgaatggcacgggtccattcctgttgtagagagcaatgtattgaatgaaaaatgaggagcacaggaagtgttaggcaaggacagtgtccccaggttctgccggccacaaaccggtttccttgtcctctgagtctggctggaggggactggggagggtagtctctgagagcttgaccaaggtggctggggttgctaatggaagctaattatatgagtctggagagatgctggggttaggtagtactctggctaatgtcagaataatggctctgtgagtggtctttttttgacaatagccagatttactggttaatgtccaatctactttttgaaagagacattttggtggcttaacaatagatctttctcatctattatgaaattatagcagtttagtctcaccagagattcatattgaggtgaaatggacacgtgggtagtcaggagacctacttttaattctggctgggcatgcttcggcaagtgtcgtcacatctctgatctttctcatgcaggatccactgagagtctaatgggtctccagtacagttcctttctaggtggtgactcaagaacctagtggctctaccatctcaattggtagcctccagtcttgccaaggcagaggaagggacagtgtgggcaagtcacacttgctcttaaatgcccgcacccaaaagtgatacacatcattccctccctcaacagtgaggcctctggtctcttactgtgtcctccagggggacacagtaagtgctttgaaacttacaaaatgctttataacaggctaaggagatggtccccaatatgggtgtgtgcacaatatgacacactgcagtgcagaaacaaatgactggcatttctaccctttactgttaaaaacaaacaaacaaacaaaccaagaaatcaagttttcctgatgttaagtccatgaattaacatcgggatccttgttcactcagtatgtcaggcagccatggagaaaggagaagacccctggcgggagagtaggggtgcttcagcttagcggggttggcaaggaagccctcacatctttgtttgatggccgcagtgccatgtatgtgtgtctggggtgaagagacttctagcactcatgggtgtctggttccagtcttcttcctgggcaaaatgtctatttcctcgaggcagtggggcggggatatctggttctgtatgggctctgtgtgggtactggcagaggcatttaagagtgggtgtgagttcttcacacaaaactttgatgggtaaagtcaagagattgtggatttcttcattactgtagcacaatctagcatcttctcactaattcatctggtcgagtcaggttacagattctattttctgattttaagctaactagtcctctcagacaaagatgaatggcttacaaagatcctggaaaacgggcatggtggctcacacctatgatcctggcactttgggaagctgaggcgggaggatcacttaaggccaggagtttgagaccagcctggggaacatagtgagaccctccctcccccctgtctctaaagaaataaaaataaaacataaagatcttggtaaagccacaagggtttgggggtagtattagcaatggaaacacaggagaacatcaagacagtggctgaactgatgcttcccccaccccagtggtctgagccctttggcagtgaaaacacaaagttaaaaataatgatgatctcatcagatctgacaagaggttggccagaaaagggttgaaatgatcaggaagactctttgtatgtgaattttcatctactctcttttacagtgagccctattctcattcattcatcaaagaaagaaagaaggcaggataaatgaaatttgataaggaatgaatgagctagatccagggggagggaggcactagaatgtgttggttaagaaccaggacttgcattttaatctgttttcaattttccagctgtgaggcctcggacaagtttcttaacctccctgagcctcaatttcttcatctgtgcaatggggatcaccagagttcctccctcactgggttgtcatgtgggaattcaatgagataatgcgcgggggtgcctggcacgcagtaaggcctcgatgaatgttagatgttcgtttgttttaaagctgcgaggagtacttcgcctcgatataaggacgaccgttctaatggtgggagctgttacaatgagctattgttattatgcaatggagggaggccaaagagaaggatggaatcagcaagatctgggttcaaatcttgcccctgacatttactggctgtttgaatttacacaaggaacttcatctccatgagcttcactttcctcatctataaaaagggactattaataccaacatggtcagattcttataaggatttacctcattcattcattcattcattcatgtggggatgtgccaggtaatcttttaggccctggtaatactgcagtaaacaattcaggcaaaaatcccagtttgcacggagctgatggttttgtagagggaaggggcacacagtgaacaataataagtcaacaggatcatttcaggctatgataatggctatgaaaaaatgaagctggtcaggggaaagagaatgactatgagatggtttactttagctggggtgatcaaggagggcctccttgtggatgtgacatttgagctgagacctgaatgataaagaggagctggccacatgaccatcagtgggaaaagcattccaggcagagggaacagcaagtgcaaaggtcctgaggtaagaacgtgtttggcaagcgtggctgaagtaggttaagtggaggggacagtaaggaatgtggtaaggggggcagatcttagagtgcctccaggccacacacaatgagtgcagaacatgctattattattagtatcattagcagcagtcttcctctgactcccttgtttgtcccccactaaggacctgctttggaaaacaaggacatccattcttgtggttctcctggaagatcccttcagttattcaactgtcccacatgaaaacattcagggcagcaacactccaagtccttggtctggttgttgaaggggaggttgactcactagagtgtaaggaatgattgcattaattgtccaggaaagtgacaaggaggtgactctggtcatgcaattttgagctttggcttcaacctttgggggcctcgccctgccacctcccattctctcaattcttaatgctcaggggtgagatttctatgggcctcgggccactttgaggaaagccatgcgtgcacgagacaagtatccattttctactctttcacagaatcctgattttgtgcttacgtgactactttgcttgaagataacaccgcccagcctcccctgcagctggatggaggtcacatgcttggatctggtcaataagatgggagtcggagtgttgtgtgggacttctagaatctcttttttcttttttgtttttcgtattttttttcttttttttttttttgagaaggagtctcactctatcgcccaagctggagtgtagtggcacgatcttggctcactacaacctctgcctcccaggcttaagcgattctctgcctcagcctccggagtagctgggattacaggtgcgcgccaccatgcctggctaatttttttgtattttagtagagatggggtttcaccatgttgcccagggtggtttctaactcctgagctcaggcgatctgcccgctttggccccccaaagtgttgggattacaggcatgagccactgcacccagccccagaatctctttaaagcagggaaggctgcctcctctttttagatcttcctccatcctgctgccagggatgattacatgattgctggaactctagcagccactgagagtcgtgagactgaaaaccccactctgggaaaagcagagcagaaaggtggaatgaggctggggccatgatgactttatagagccatggtactagtcgtggactattttcatctggactgatgagagaaatatacttctctccctgggtctcactttgttatagagccaggcctagattctaatcagcactgcagtggttagcccagtaattctccagtatatggagaatatggagtacaacttacacatggactgccaacccatctgatagtaacacaggcaaaaagacaccggttgcccagaataacgtagcaatggactgggaacaagttgctcagaaaacaactccattccatggaacttgagtagttccctgtgtccttaactggctccactccacacccttccttccttccctttctggactctcagtagcctctcattttcctgttctaagagggaggtcaacagagacctcggcaccttttcatttgctgttccctgggcctggcctggagagaccttttcctgccacctcccctgccccttcaccagtttgctttcttccttctttcgggactcagtagcaatgtcaccagcttttcctagactgaattaagttgagtcagccctttcattgccctgtcacagcagtctttgtgaagtttcatcactcgccttcttaaagtcctccagtggtgtcctgctgcacttgaaacaaggtccaaactcttatggaggctgcacggccctgcctgacttggcccctgttgacctctctgatctctttttctctgtgctcttgcacatagtcactcccttccagccacactggccacctgtctgctcttccacatgccaagcccactcctgcctcaggacgtttgcacttgctgtttctctgtctagaacatcctcatcccagattgtctgtgactggctccttcttatccctcacagtctctccttagagagactgtccctcactgcctgattaaaaatacctcttcctcagtcactcactcttgctgcactgttttacctccttggtgatttgtcacaatctgcagtcatttttttttttttttgacagggtctcaaaagggtgcagtgatgttatcatggttcactgcatccttgacctcccaggctccagcaatcctcccacctcagcctcctgagtagctgggaccacagatgtgcgccacaatgcccagctatttttttttctttttgtagagataagatctcactatgttacccaggctggtctcaaactcttgggctcaaggaatccttccgcctcagcctcccaaagggacgggattatagatgtgagccaccatgcctggccaaatcattttgtttatttgtttgtttactcatttattttccgcttctccaccaacctaggttagcacatcaagggcagggactgtgtctatttcacaaggctgggtccccactgcccagcacagagccagatgtggcattggcactcaacaaatactggtgcactaaatgactgcctgaatgaatgaacaggtgaatggtttgtgagttggtcagttggatggagggatggatggatggatggaagtttggatggatgggtttagaagccatgaccccaatcggaccacccaaatgcaatatgtttactgagcacccctcctatgcaaggcactattggaaaatgcaagcttgaattagcagctggatgcctgatactaatgatataataacagctgagatttattgatttctcaccaaagcaggcactgcgccaactgcattgcatgaccgatctcatttactccttatatcaaccccaggaggtagatactctcgtaattcctgctttgcaattgtgaaaaccaagcctcaaaaaggtgaggttccattggaggaggaaacatttgggctggggcttgagggctagagatggattccagcaggcagagatgggagtaggggtgttctaggcagaggcagctgcatattcaaagggttggaggtggggaataacagtcaagccagtttggctagggcaggtgtgcacacagagagaaaactggcaagaggggagaccaccatttactgcacacccgcgacatgtgaggtaccaaagcatttattcaccatcaccccaggaagtagctcctcttttcaccttcatttttcagaggatggatctgaggcttggagcccctaaataacatgcccagagccacacagcaggattaggacttgaattcatgcctgtctcactctgaggctgggtcagagatggatagtcagaggttcaggaaggagttgacaaggctggctatggagtaactgagcatgtactgggagccaggcacagcatactatctcaattaatcctcacaagtacccaggaggtaggtattagtgtggtggatatgtttttggatagtttagcatcattttttgggaattgttcctcctccacaatcacgcattaagtgaagttgaccctgtttctccgtttcagggggtaagagtgagatccaagcttaccagttaggataattcatctccctggccacagggattactttagtagtgtgggcatgactaaaattggtcaatcagggttcatcctggaactttttctcaaattattgggaaagaggtggtctctttcatcaggggctgttgggttaacaggatatcaaccagaagtggctggagggtcaactctggctctctggggaaaaaaaatctgcccaagagtgtagccaaagcagagggactctgtgccaagacacaaagacaggtttctaatgacattatttgagcacctggatccagccatccctgaagccatccctttggattttccaacaatatgaactgatgaatgctctttttggattaggccagttgggctggatttctgacccttgcaaataaaaagtgatctgactgaacaaaattgttatcttaattttacaggtgagagagctaagattcatagaggtaaaatgacttgcgtttaggatccacaggaaggaaggggctgaatcacactgagatatcacaaagaaagtgcatggcatctaccaggtcctcaagaaatgcctgttcccttcttccatagatcaaggagtggtggagagaaggacgggaggaggtatacccactggtggaagctcccccatgagccgcaagcttctgggcagattctagattgcatctggaatcctccaaactctcccagcctgcactggggtctggcaggagcaaccaaagcccaggagttgacacataaagtgaacaagcggtcagatgtcagcatttgaacaaaattcctgaggatcccactctctccaaaaaagtgtcatctaagagccctggctgcaacacagggtttccatagaagggccagaagtcttagcacttctcagggcttacgcttagtaggatcttgtacagataattgtttcagtaccaccaaggattctgtggtcacttgaacttctcaaagctccttcatattgaaactggatagagagtaaggggttagcctacaaactttgactttggacaaagttgggttccaatcctggcccttggcagctgggtgactttcggtacattacttaacctctctgagtctcccgtgtgaaacaggcagaatcggaagatgaagtcagacaaaacaggtagacactcttagtacagagtttggaaccacttcagcttttgggcaagcagattagttctagatataggttgaactctggcatgtatgatcacattaactctctgagcctcagcttcctcatctgtaaaatggggctcagaataataccccctgcacaggtggttgtcaggcagcaatgaaatcatgcatggaaaatgcgtaccccagggtacgcatgtgaaccgaggacaccctgccagcaggacggccccccactcatccaccggcagggagttttggcccacacagtgaattcgttgccaatatttattttccctatgaattcacatttgagcttctcaagaaaaatctgaagctctgggtactcttggtccacgctgctccgtggcaagcccaggctgccgctgcgcggtgttaagtccagtcctgtactctaaaatctcacgtgcaccctgtgcgtgttgtttatgaggctcgcttggcttctgcaggaatctggtttgggagcccaggaataaatcattagacgtgtagccagcgatgagggaaaagattaaacagtgccagagaagcagtcatgggttccttagggaatgctgggccaagagctgggtccgcgagatgccctggatcaggaatatgcggatggaatccctgcctgggccagcccctcatccatccgtatatggctgcagagaagccatgttgctgcttccttagagcccctggctgcattttcccctcgtctctcctgcttctagactgctctgaagctcctcctagtccccaccgctcatcctaccacacctcagtaaagcagaattagaggattaaaaaagacgggcaggagataggggactactttagcccaacggctttggagggcctcactgaggaggtgatgcgtgagtgcggatctgaggaatgcaaaggagccagctcgcaaagatctggggaaaggccggtccgggcagcagtcacggcaagtgcaagggtcctggggcagggaagagattggcaagaagaggaggagaaaggcgaccagtgtccctggtgctagggaggaagacaaagggcgtgagagttgaggtcaaagagagaagagaggcaggcctttaagacctgataggatgttttgaacctgagaatcctgggagccacacggccatggcctaatgtaggtttaaagatcccctagctctagccaggcgcagtggctcatgcctgtaatcccagcactttgggaggcggaggtgggcagattacctgaggtcaggaattcgagaccagcctggccaacatggtgaaaccctgtctctactaaaaatacaaaaattagccgggcacgggggtgggcgcctgtaatcccagctactcgggaggctgagacatgaggatcgcttgaacctgggaggcagaggttaaagtgagccgagattgtgccattgcactccaacctgggcaacgtgaaactttgtttcaaaaaatagtaaaataaaataaaataaaataaaataaaataaataaaataaaataaaataatccccgagctgcacctaggaacagcctgtagggggactggaatagaaacaggaatcaaagtgaggaggctgtggtaggtgtccaggcaagagactgtgtctgttcacagtacggaagacaaattcaagttatattttggaggtgaaatcaaccaattgctgatggctcagatgtgtggggcgagggaaagaagagtcaagatggaatcccaggttttcatcctgagcaactgggaggatagtggtggtgtttcctgagatggagaggaatcggaggagcacctggggccagatcatgggggtgctgtgaacatcagctgaggggtctggaccagaccccgcagacaatggggagcttgggaaggcttctgagcaacagcagaatattcattcagtcattcaacaaacatttgtggtaaaagcttgtccatattctattctctcacagacggcaaagctccccacaagcagccgtgggttatgggccacaaacatccttcctgggcctatagagtgcacgagaaagctctacctgcccatccacattttcccttcccgacttcttcacctctggcttgaggagctgaagagcatttaaaaaatattcatggctgggcgcagtggctcatgcctgtaatcccagcactttgggaggccgagataggcagatcgcctgagctcaggagtttgagaccagcctgggcaacatggtaaaaccccgtctctacaaaaaatacaaaaattagccgggtgagttggcgtgcacctgtagtcccagctacttggggggctgaggtgggaggatcgcttgagcctaggaggtcgaggctgcagtgaaccatgtcaccgccacagcactccagtttgagtgacagagcgagaccctatctctaaaaaaaaaaaaattaaaaaaattaaaaaatgaaaatatttatttactccctgcctgtcttttcctctaaaagctccatgaaagcagggaccatctttgtaacttcagcatctctcatgcctagacctgtgtctggtacatagtaggtgcttaataactattgaggaactgaattttaaaaataaataaatgagccctagtctctcagactgaaggactgactgagagcctgtaaagtgccccgttcagggcctggtatacagtagacattcaataaacagtaatgaaaatatacacagaaaatacagccactctgtcaggtccctggtaggtcttgaggcttctccagtgtaggaaaggccagaggagtaggagggtgaggtggcctgtgactcaccctcccggggcccctgtcttgggcctaggcctgtgggcatggcgtctgcactaatccggctaagcagctggatgtgcaagggtgtgtaatcccaggcctgctggctttagcctgaccttggctaggatgacccaagtcaagaagaacgctcctgtcctcttaggccacccagagctgagaccctctacacaaccggggacagggatctaaaagacccttcttgggggacagaggggtggcaggctcacctaggtctccccccgaagctccaacccagctatttggggtatgcatctctgcacccctccccccttgctacatctttgccccagtgtcctccctgatggatgatgcggcacagaaatactatcggggaagaaaaggggcattcattcatcaaacatttatggagccaagctatgtgccaaacacttttccagatcctgaggacacagcagtgatcaagacagactctgtcttcagggaactgatatttgggtgggggaagcagacatgaaatgaggaaataggtaaattaaaaaggatctcttcaaggtgcaagaaaatgggctaatgggatagagactggctgtagggacatcatcaactatggtagtcagggagggcttctctgaggaggtgacatctgagctgagacccaaagatggagtatcgagttgtatgaagatctgggaaaggagcatccaggtggagggaagagattttaatcctagtgagtcatataagttggcaccattgagtacactgaatagataatgaacataataactaacatttactgagtaccgacaatgtgtcaggcccttttctaagtgctttgaatgcaataactcatttaatactcaaaacaatcgatcattttcatccaattttacagatgaagaaaccaagccacagagaggtcaagtgctttgcccaaggccacacagctaacaagtagcagagctgggatttgaacccagggctgctctacctcacaacctatgggttgttccctatctttacagcacattaatgttttacaattaaaaacattaattgttgagcattaccaagcaccaggtcctgggacccatggcgtctttatctggtcctacctctgaaggccacccactgatcctctgccctgcacctctctctcaccctcttctgatgtctctactctgaggccacctccagctccaggagtggccatgtggctctgcctggtccaatcagcatagaccaaccctcccagcctttgtgattgactgagggatgggcatgtgacacaagatggcttcatgagagtggatcttggaactttgcaaccatgggggaggaggagttctctttgtttttttgttttttgtttgtttgtttttttgagacggggtctcactctgtgtgcaggctggagtgcagtggcacaatctcagctcactgcaacctccgcctcctgggttcgagcaattctcctgactcagcctcctgagtagctgggactacaggcatatgccaccacgcccagctaattttttgtatttttagtagagacggggtttcaccatgttagccaggatggtctcgatctcctgaccttgtgatctgcctgccttggcctcccaaagtgctgggattacaggtatgagccatcgtgcccggccaggagttctcttttgagggaaaatgtctagctgggagataggaagcctggagcccaaagagcttgcttgagagtgaagccctcgtagaggagggcagagacaaaagatggagagagactgagttgcaatgacaagcactgatggtattgttcgaggcctgtgtatctgggccagagccagaaccacttctgaacttcgcagttgcatcacccctcccattttttttcaagcttaagccaatttgaattggatttctgtctcttataactgcaatcagaaccttgttttcctcctggaatgttcttccttcttttctctcttgctaccaattaatgttactcttatttattttttatttttagatgcagtcttgttctattgcccaagctagagtgcagtggtacaatcttggttcattgcaacctctgcctcccaggttcaagcaattctcctgcctcagcctcccaagtagctgggattacaggagtgtaccaccatgccaggctaatttttgtatttttagtaaaaggcaaaagatttatacgatctgaagagaaaccagagaataatttttgtatttttagtagagacagggtttcaccatgttggccaggctggtctcgaactcctgacctcaggtgatctgcccgcctcagcctcccaaagtgttaggattacaggaatgagtcaccgcgcctggccccagtaatgttattcttatgaccaccattaatatgaccatcactgccatcgccagtacagcgactattctcatgaatacttctattgccactgccaggaatgacagcatcatcctacttttaacacagtgaacacaggggccattattgctacactgatgctgtttctactactctttctgctattagcatcgcacttcccatttgtaaacctctcctgagtttacaaagcactttcaaaatcctctcattctcttctaaacctcaccacactcccccatgagtggggcacagtcactactgttagttccatcgtaggggcaggggaatcgaggttgcagaagtgagaggaactgcttgcagccatagccaatgggactcagacccacctactcattcatttattgacgaggtggcactgaacgccttcggtatgaggatggactctgctagatgctgggacgcagcagtgaacaacaccgacatcgttcctgccttcgctgagctgccctttgggtgggctccagaacattccaagagcctccctcacaggccccacaggaagccaggccaggatcattctgttctcctcagaattctgagaccagagtggaggagcccagtttgtgagcagaattgaagcactgctgtggattttacttcttacctgagctgccttgggcaacagacccagcctttgagccttccaacaagacagtgaattccttggcaaggagagtcctgacttaatttttctgtctctgctacagtgcctagcacagggtcgggcacagagtaggcactctgtaagtgcttattaatggattgctgctcagaggcagaactaggcctccttccatctacccaactttctattcttctatttgtctaatatctatcaatttccttccttcttctattcatccatccatccacctacccacctatccacctgtccatctgtccatccgtgcattttcctaccttgcttcctccctccttccttctctccccgtccctcccctgttctccttgggcaatgaagaattagtccagcctccaggtttttgctcctgctgtggctactccgaaggctccttccccaggatgttaacattttcctggctcttagcaatttgcaaagagcttgggagactgaacaaacaaacaaaaatccagattctctcaaccacttattttctttttttttttcttttctttttcttttcttttttttttttttttttttttgagacagagtcttgctctgtcatccaggttggagtgcagtagcgtgatcttggcttactgcaacctccacctcctgggctcaagcaattctcctgtctcagccccccatgtagctgggactacaggcatgagccaccatgtccagttactttttgtattttttgtagagatggggtttcgaggctggtctcaaactcctgatctcaagtgatcctcctacctcggcctccctgactgctgagattacaggcatgagccaccgcacccagccttcatccactttttgaggcactccgaattcctactagatttcttatctttcctgacaacccagtagcaatcctatgcttacttttaaaactcttttttctggtttcctgcatagtgtgctctctctcctcccctctactgccagtttgggattgaaaactcaaccaggccagagcagtgactcacccctgtaatcccagcactttgggaggccaaggcaggaggattgcttgagcccaggagtttgagaccagtctggggaacatagtgagatcctgtcactactaaaaattaaaaacgtagccggatgtggtggcacacacctgtggtcccagctactgtagaatataataaattcgtcttcaaaggttttagcctgtaaattgttaagtacaatgagttctgagatcctcttcaaagaaccaatgtatcagtatgttcagctcccctgttctttgttcttcattttaaagtttaactttctcgttctttacgtctccttgcccctagtttcagcaaccaatcttctcctagcctctatcacctgctctgaccttagtcatctttggccacctggtctgttcttagtcatcctgggtcacctgctctgttcttaatcatcccgagtcacctgttctgtaaccatccttcccgccaaactactcaccctgccactccagcttgtacctctgcctctttaaaatagccaatcggaattaccttagactgtgcagtccaaccctagccaataggggaaagacacagcagcaggaactagctgcgttgggatgagaatcccttcccctcccttgtctggtgtgctctccccattgctccatctgcgagatgcacccttctatagaagtacaattgccttgctgagaaaattaaatttatgtttgagtgctgtttcttttgcggcactgaaaacttatttctaatattactcaggaggctgaggtgggaggattgcttgaacccaggagattgaggctgcagtgagctatgattgcatcactgcattccagccttggtgacagaacaagggcctgtctcaaacaaaaagaaaagaaaacctaaccagctactgcagctaggcaggaagtgcaaatgaccaaagcaggctggatatcgaactccaggaaggagtgcatgggccacctctcaagtgggcggccactaccagctccaagagggaatagatgtggcccagagtggtctaattttccagtttctcagtagaaacaaacaagtgaaagtctaggggttcttttggtgaactcttcccaatttgttaatgtgggtaactaattaaaatatgtaaatgcagttcagttcaaacaatacatgcttacaggatagagctgcctctcttctctttacaacccctctggtcactggccccctctttccctccctaccctgcaaattgccacaagagagctcaactccaagaagagcttattgctttgaatacaaacaaaatactgctcataatagctgctacccaaaactgaacatccaagtactcaagtcacctctattgttatcattgttttacaaatgaagaaagcaaaaggctcagagaagttaaggaacttgcctaaggtcacacagctaagtgacaaactgaatttgagcccagggctgtgtgactccaaagacagtgatctagcccagtggtggtggcattttgccacaggaggcattttggaaatgttagggaggacaggtgtttctggttatcatggtgatactggcattcagtgagtgggacccagggataagagacgtcttgcaatgcacagtcctgtgtcgtgaagtcttgtcttgttcccaatgctaatagtaccacggttttccctcttcccccacaatggcagccattattgagtgcctagtgtatgccagggactttagatccagcagtccaataaggtaggtacttttagtatctccattttacagatgggaaaactgcagttcaaagaggggaggtgacttaacaaaggtcacatgaactgggaaatggcagcagggctgagtccagggtgaaaaaaattaagggtgtgaaatttaaggcattgccaaataactcagtaagcaagataaatactactttaatgtaacatttaaaaaatcaaacttaatgtaaaaccccccatgatgaacaaaatatctatattttcaataaagacaggatcagcaacactggtgtgctaagccatatgggagtgaaagggaaaaggaaaaaattaatactgatcttgttttgtttcgtttttttgagacagagtcttgctttgtcgcccaggctggagtgcagtggcactagctcggctcatggcaggcaacctctgcctcccgggttgaagtgattctcctgcctcagcctcccgaatagctgggatcacaggcatgggccactatgcccagctaatttttttttgttttgtctttttagtacagacagggtttcaccgtgttggccaggctgatctctaactcctgacttcaggtgatccgcccgcctcggcctcccagagtgctgggattacaggattacaggcgtgagccactgtgcctggcctgatcttggatttttgtgcccaaggtgagtgcttcgcttaactcactttagtcttgtccctgagtggcaggccatgctaattgtatctgtctctgtctcaccagcctcaataagatgtggggagtccattcttccactcccagtgctccaggacttcagcacgaatggtgaaattacaggctccagaaagccatgatttctaaagcagaagacggacaggcctttaattagagccaggcgggtgggtggccagctaatactaagttccataatactaagttccgtaataagcactgtatttttgaattcactggcttgatcacacacatcccggaggcatctttggaaatttgttcatagaaaatagggtaaacagctatttgtaccctaagagagggaaaatggctttacagtggggtggctatgacaagggtgtgctctggtggcagcagatctgggacaaaccccaccccaccactcactggcagtgtggggctgagcaagtcacggccctctctgagcctctgctttctcatgtgtaatgggaatgagaacacctaccttgctggtgatggggaagattaggattaatggacagtagagtcatatcctcatgggtttggttccaacgataaccagtaagatgaatatctatcacctacttttgaaaatccctacctttatattgtgaggacctgaaaactggaagctcagaagccaggaaatgatgcattttatcccagatgtggcctctctgtttgaggcaggaaggtaaccagctaatgcagagggtagggtgggggtggttagggaaaggccaacaggtgaaggagaaaaataaaagaatttttctttgtctctcttccttctcaagtctcatacattagatgcccaggtgtgaaactctgttctagctaaaattctctggcatatagaagagctcattctggttcaggttttccaaggaacaatcagcaggggttccagaccacacaaatggcctgtttctggctgtaatcacacgtgggagctggctaatgtccccggagtcaggctggagtggccaagacaatcaccgtggatttagccaggggctgctgccttgggaatctttatttgtgcttgtgttgcctcctctgcttccaaggataattaccagggaggtgcacaaattggaggcaaagacaagccactcgtagtgtgcaaaggaccctgatcgtgacagtgcaagtaaacaaaccattaggaatgcaaagattgacagataacaaacaagatccgtgggcaggtgtggtggctcacagctggtaatcccagcactttgggaggccgaggtgggcggattgcctgaggtcaggagttcaagacctgtgtggccaacatggtgaaaccctgtctctactgaaaatacagaaattagctgggtgtggtggtgggtgcctgtaatctcagctacttgggaggctgaggcaggggaattgcttgaaccagggaggtggaggttgcagtgagccgagatcgcaccactgcactccagcctgagtgacagagcgagactctgtctcaaacaaacaaacaaacaaacaaaaaacaagatcttctgagcaggagccactgttagctggaggttggatccagtgattctcagcagggtggcactacccataaggacatgccctgaaaatgtgcgagggtgtcacaaggatgggagaggatgccacaggcatgaagtgagcagaggctgaggacaccaggcgacctgtaatgcacgagacagccctgctcatggataaccttctcttgtcctgctcaatgttggagtgtcccagtggatactcaggtaggtgaacaacaacttgtttaaattaattttagactgtaacttcattttatatataaacccgccaaatatgttttgccaatgttttaatctaccctgaattttccagaaatggcaacgcctggtgaagcaagggaagaactggactttcttctgttcagaactttaccaggagttattcatcgtattggaaaagtcatgcagctgatgtcagtgctgcttgggatatcagagctgccagcacacctgtacctctgtttttgtcacggtcacactcatggtgcttctatgtatagtggaagcatctgacaacctcatggtgttttctggtgttgttgtcctgaccaggcatttgcatactgaaacacacacaagtttaatacaaacgtccttgtaattattcgttctaaagttagggaatgatattgatttttttgaagttacatatatagtatattatctgtgaatttcattttagaatacgaagtggtgggagaagttaacaaaatatttgttatttataaaggggacttgggctctgggagtggaaaactgtgaccctggaaggtgcacgtgtttatacgtctcacccatgcaaggtggccttccttggctgtcttctacctccctgattaggctccaactctctgctcatattttcagagcgtctgcactttttttctttgcggcacttatcagaaccaaagtgcacatgcaccaccctgagagcgagctcctccttcaattttgcatcctgggcacctcactcttccaccctcttctgggtcctgcgaactagcttcagctatttgtagaattagctgtaatgcccatctccccaaccaagctgggcgctccagtgcggggatcgtgcttgctgcatttattgctatatctgccgtgcttagcgcagtgcctggtgtgttttagtcactgattgaatgagtgaagggctgtatatttcatatacatcataggcaaataaaaatgaataaattttaaatttatggcaaggctaaaagatgatcagccctgggtcagcacagagagggtctgcgaaagcaagtaagacctagtcttcctccgtctggcagcggggagagacagatgcaaagctgaggcaagggagacagggaccctcccactgcttgggagaaacacgtctacgttagctgggggcaggtgagggaagacttcctgcaggaaacaccacttgagtcttgtggggagaagagtttgccaagcagccaccgaccacatggtccagctcattattttacagatggggaaactgagactggtggggaaactgagaatggttctaggcccggctctgccaccgtcccgctgtacgaccttggccaagtctttcttcttcagtcttcccatctgtacaatgagatgacctctagggtcagcctcaccttctgggacagaagtctcaaactggcagctcctgggctgaattctcctgctcctggctgttacctgccagagaccaggaggtgtttgagctgagacctgtgtgaaggttaccaactttgtaaattagatgccacctaaaagcggtgattcttgatcaggggcggttttaccccccaggggacatttggcaatgtctggagacatttttgattgtcacactgggtgggggttgtgtgtggggtcgctactggcctctaatgagtatacgccagggatgctgctgaacaatcacaggacggccccacagcagagaactctccagccccaaatgtcaccagtgcggaggctgagaagccccgcctaaaagtccagtccttctgggccactctggctcctgggaaggccccaggaccccgtggtctttgtacttggtgactgatctccagccttcctgccgctgtctggagctgtcctctgactgcaccgtcaccatgctttctccccactaggccctggctccctctagcctccgctttccagggcagggcctgcctctccagctcacattttgactatactgggtcaaacctgatagcaccctggacataggcgcctgtctgttaagactcctgttttccacaattgcagacagatgcacagagagtgtcactagcttgatcaaagtcgcacagcaaagggagtgttggggctgggatttgagcccagataccttgaccccccccgcccccagcccatttactgcaattttttaaatttttttttttatttttttttgagacggagtctcgctctgtcgcccaggctggagggcagtggcgcgatctcggctcactgcaagctccgcctcctgggttcacgccattctcctgcctcagcctctggagtagctgggactacaggcgcccgccaccacgcctggctaattttttgtattttttagtagagacggggtttcaccatgttagccagatggtctcgatctgctgacctcatgatccgcccgccttggcctcccaaagtgctgggattacaggcgtgagccaccacgcccggcctccctgcagttttgtttctgaaaattgacttcctttgggtctgggttttctatgcctcctctcctcaacattcattgccttcctggtttgaactgagccacaaagttacattggaaatggaaacagaaggtgtctttgagaccgtctcccagggtgatgtgctgcggtctcagaaggactctctgacaatgtcacacgagggaggatgggagaatggtatgaatggtgggaactgaggtggcagccacaacacaatggtgggaaaaacaggctccgcactgggttccagcattggagcttcatgctagacccaggacaaattccttcaccgctccaagccttgctttccccatctgcagtgggagacagtgagacttccttaatcgtggaactgtgaatatttaatgggaacgcggatgtggagggctggcccagggcttgttcaatgaggggacctggggtggccactagctcctgggcctgtggaggcaggggatgctctggtggattccagaagatgacagtgggctctcctctctggagggtggacgaaggcaagcgcctctctgactgccttgctttatccttggagaattctccccagtgcccctctgtccactctcatgccacagttatcaccccaagcctttaaccagcagtcccctgggtgctgagtacgtaaccaagaggggagtcctgagccgccattcagcccttctctggcttggacacactccacgttgcatgtccattcggttgcatgtcctgagtgctttctgtgtgccaggcactgtgctgggctctgggagtcactgtccccaagacagcagaggagccaacaaacagatgaaatggcagggagggagttagtgggcgatggagagagtgccaatgggagggaggcagagggttaagaaagcccctctgaggatgcctgctaagcagaggtctgaggccaagcactgtggggaagaggatacagcgtgtgcaaaggccctgagataggaacggtcgtgtttgggcaccagaaaggaggccagtgtggccggtgtggaagaagcaaaggaaagagtggccagagatgataatggagaggcaggcgggtggcagatcgggcagagctttgaaggccggggtgaggaacttgcaatttattttaaggacctagaggaagaggaggctctgggccctgggtggatgagctgccttacttcttggaagcaccagggctcatgggagaacctgaccgtcactcaacccccgaaacctggctggcttgtatgcagcctgtccccgcatcaggaggggccaagcgacacctcgctgcacacagcagcctcattcctgcctccctacctttgctcagacaggatcccctgcctggggtggcctctcctctccctgatttgcccactcttcctcaggaaaccttccctggcagctagagcctatggggccctcctcctcccaaccactctcctggtgttgaaatccactggggtagtttgctgtcaatgaagatcccagggtcttccacagagataatgattcaggtgatctgtgctaggacccaggagttcacatctttacaaacacttccacgtgattcctctgtccggcattggagagacatagctgctggcatgtttccagagctacttcaggcaacagggcacgcagtatgtgtgagggggagaagcagggggctcagtggaatcagaaggccctgggttcacatctcagctttaacacttacccagctgggcgactgtgggctaatcaggcagagctttgaaggccagggtgaggagcttccaccacctcttagagcctcagtttctttctttttttttttttggagacagagtcttgttctgtcacccaagctggagtgcagtggtgtgagcttggctcactgcaacctccacctcctgggttcacaccattctcctgcctcagcctcctgaatagctgggattacaagtgcctgccaccatgcctggctaatttttgtgtttttagtagagatggggtttcactatgttcgccaggctggtctggaactcctgacctcaggtgatccacctgccttggcctgccaaagtgctgggattataggcgtgagccaccgtgcctggctgagtctcagtttcttcatttataaggtggggacagtcacactgacctcagagtattgtgaaagggatgacaaatataatgtgcctaacccaagaggttgcccacagttggtgcttaatagatgcagcctggggcccactccacacttgcttccctaagggcctgaataaggcaatgctctctaaaccagggctcagcaaactttgtctgtaaaagggtcagagagtaaatattttaggctttgggggccgcatgatctctgtcacaacccttaaactctgcagggcagcacagacgcggccacagataaacagaaatgagtttgtgagttatggctctgttccaaaaaccctgatggtcctaaaatttaaattttatatggttttcacatgtcacgaaacaatatttttctttggatgtttttcagccacttgaaaatgtaaaaactgttcttagcttgagggctgtaccaaaacagggggtgggctagatgtggcccacaggccctggattgctggcccccgctccagaggctttacatgtcttagctcataggaccctgatgagataggcagccctatgttcagatgaagaaacggagtctcagagagactggaatcctcgggcaaggttccacagcagaaatagtagatattttagtctttgtgcaccatttggtctctgttgcaagagataactgtgagatttgaactcaggcagagctgggctcagagcccctgttattaaccacagtacactgtctcgtggaagccacacaggccacagatacaccacatttcagaaccagtgaccttatctcttaaaaccagaatctctgccttcatatgagcctaggtgggaaaggctgggctggtcaggcaggaaagacagtcttttgagcttagagggtggagggggcttctagggccattggccacctgagctgcagccccgggcacgctttgcagtcccctttcctgcgctgaccctatctggtaggggtgagcctgcctgagtaattaggtctgactgctgcaggcccgctgaggacttcacgctcccaacattctcctccgtcttattcatgtttggtatttttattacattattttgacatgacattccctaagtgacattcagctaaactgtgtttttgtagaatagggacttgccactctctcggcactgctgcattcatgatgacagccacatgtctgacatctcccccagggtgcaattacatgttgacaaaagaaaactctgaaaaaatttagtgtggaaggaaaaagctcaagctgccttaattaataagttaattaattttcattcatttgtactgttggcgatatagtggtgaacatgatagtcaagattccttaccacaatgaagcttactttctagtaggggagtcagacaataaacaaataaacaaggtaatagcagattgtgataagtgctatgaaggaaaaaaaatactgagatgggatattaagtggggcagaatatgtccctgttatccaacctctccttttcttagtgttatagatccactgatgtgcattgggaaacatactgcccagaatagagactgtttcccagcctcccttacagctaggcatggccaatggatatggtagaagtgagcagatgcctggggccttacgtgtccacaggcatagaagcgtgcgcctggcacttgctctttccctcttccaccagctagaaattctctctctcatacctctcttatctctcttttcctactctatctatctatctgtctacttatgcaccatctatatgttcagtaatctgtccatttgttcatctgttatctatccatccatccatccatccatccatccatccatccatccatccattcggcaagcatttatggagagcctgtggcagattctggggatgcaaaaactaaataaactcaatctatcccctcaagaagcccagagccccttcagcagagtaagcacctaagttgctttatgaaacataacagaaatcatagagttcaaattccactctgccactttgctcatatgacctcaagatagtgactttttacccctttgaaccttaactttctcatgaatacaatggagatgataatctctgcctctgaagattcgatgagatcagaaaggtagagcactttttagagagcctggcacacagcaggcattcaaaatactcttcttattagtctacgtgggaactggggaagtttcttggaggcttctgggcttgacataaaaggatgaaaagaatttggatgtgtgagattggaagaggagaaagggaattctgggcagagggtacggtaagagcaaaggcaaaggggcagggaaatttagggttcatcgaggagccagtgagagaggtgtgcctccctgagcatttccctccctgagcattctcctggcagcaggttccagagactgaaaaggacagggacagggtggggtgggggtgattgacaggctcagaggggtgaggacctgcagtccaagtgacccaaatagccacgggcagagagaactgggttatgtgcattaatctccaccccgggcaggctcccctccaccctctatctgggctctcgggccttgctgggtgggaggaagattgttttgacacttggatgtcgcttgggcttctcaaacttaacaaggccaaagagctcttgatcccccactacctgctctgtactatgttttgccttttttggcaaatggtgcctccatcctcccagatcttcaggctgtgacccaagagccctcctcgactcctttctgttcatcggcaaatcccatgggttccaccttcaaagtagtctgagcacttctcctgcctccccgatcatcaccctgggccaggcccctgatgtatcctaccaggactgttacagtggcctcctcactgctgtccctgtgctgtccctatgtcctccctcacccccgcagtctgttttccaatcagaacactctttttaaagcatgcattgatcctgccactgccctcctcaaaagcccccagtggagtcccagtgcacctggaatgaaagccagcgcctcacacagccttcaagaccctgtctgatctggccccggctacctctctccactcacatccaccagctgagctaaacctgctgcagccactggccctgctgctcctccaatatcccagactgggtccagcctcagggcctttgcacttacagttcctgccaggaatgctcctctcctagatctctgcaggtctttcttatctttcagcgttcagctcatccgttatccccagagggacctccctggccaccctagccactttatcctcatctattatctcatgaccctctttcagggttttggaagcactcatcatttccttcttgacttggtaattgtctcattcactagaatgaagtttccctgagaggacaggaactatgtctgtcttgatccctgtgcaacactagctgcctgttacacagtaggtactcagtaaatgtttgctggatgaatgaatacacaataccttccctagtggggatgttgaagcgacctctcataactagaaacacactcaacgggagcattttcgagacatctgagtggtgtggcccctgaagatcatgggagctaccacacccactgtacagatgtggaagctgaggtccagaaggaaagggaaggaacggggccccaggcacatagccctgccagagcagaaccaaggctgggacccagatcttctgcccctcagcctctcaggcaggcactggttcccagtccttgcctcatggaatcttcctgaaagcccccgaagtttgcagatctgccctacttcagccgctcatcttcccctgctccacgtggagagctcttctagatgggttggtttctggaaagcccacaaggaaggagggaaatgcagcctttcccctctggcgcctgtttcccttggtaactgtggggtatgggctgtgggcaggtgtgggtgtggagaggagagatctccagggtaggggtttgtgctgcctccagggccacagccaagggtggcccagccccagatgcccctaccagcctctttcctgcatcctgccagaccctggctgccgggagctctcattatgccattggcagccacatgaccctccctcgacctcacgaagattctggatgggagttcaggccatattcaggcagggtcaggccacagttcacagctcagtgtggtcatgtagctttggaatggcttcttctctctgtgagcctcagtctccccatgagtaagatggagcaaaacccaatgacattgcagggaaataaaaaggaaaatcttcttgctaccacaagaaatatcagcaaccacagtttgagcacctgctgcatgcacttgcctaagtactttaattgtagctttcaagccttctggactggggaccagagtaataaatatagttctaaaaaaaaaacccggcgagtacacataccctgaaataaacgctccacccacaagacgtatccccatgatgataatgtactctgatactttctgttcttgggttttcagtggtggttgtgatcccttagattgattttatgaccatcagtttgaaaagcactgtgttaactcatttaaacctcacaaaaccctataagagaagaactattaatatccccattttatagatgaggaagcagcttcagaggttgcgtcactctccccagtaagtgatggagctcagaggccaccgcagtgctcatatccttaagcatggtgcatggctgcccctttaagtgctggacctgggtaagaggggccccctcctgccacagggcagatggaaacctttcctcgatcctctggcaacttcccttccttggctccgggcaactcctcttttggttttcctaagcaagatgtcaggttagtaaaacagatcccagagtttaattaaaataatgagtggtattagaggaaggatgccagggccagccagagggagaaaatgagttacggttttgttcatggagaggggcggagggagagcacgagcagagggagaaagtctgtctgactctagaaaggcaataatgtttcgatgtggttttgctctcactcttgtctcctctgactcctccttccagagaatcccaaggatctttctataagatctaatcttgtcgctcctctgctttagagtcttctatggctccccagtgccttcagaataaatccacacttctcactgaggtttgaaggccctacgggatctgagtcctactaacggcacccctattgccatgcagctccctgcttcccacaccattccgatcccagaggtctcacatgggctgtgttctctccctactcctcttgcctgggctaactccagctcttccttgaaggcctgtttaaatgtcacttggggcatagagctgaacccaaatgataatacatgcttcctgtgctcatggttcagaggggagacagacaacacatacataaacgcataaaaggatagatcagccgggcacagtggctcacacctgtaatcccagcacattgggaggccaaggcaggaggattgtttgaggccataagttcaagaccagcctggggaacatagtgagacccccatttctaaaaacaaaacaaaacaaaacaaaacacacttaggtgtggtggcacacaccggtagtcctagctacttggcaggctgagacaggaggatcacttgggcccagaagtttgaggttgcagtgagctatgattgtgtcactgcactccagcctgggcaacacagtgagacgctgtctctactaaaaaacaagacagatcatttaagacagggatcagcaccaggtggaaaggcaaaggactaagctttttgaggaccatctgcccggcaccgttcagaatggcttgtgtgtatttacctgttgaatcttgctccggtctgagaggtggaagctctatcacctccacctcatgaggggatgagctggaaagtaggttgctcacagcttctcctgggttccacttgagcagcctggctttggaactcaagctgttaaccatcgcccttcacggtggctccaaacattgaggggatgggacaggctgggtaggtggtgggagaaagaaggtggggatgcaacttgatattcagtggcctgagaaggtgacctgtgagctgaacagtgggtctggccatgtaaggacagggggaagaataagggaagcagcagacgccttgagaatataaatacggcaaagagcccaaggtggctgaagtggtggtcccgcgagttcccatccacctgaaatgtgattggcccaggccagcgtgggtattgggagaggccatagctaagtccactgaaggaagctattggggtggtgcagggggtgggggctgtgatgctgtgagccccagccttgtgacagagcccacggctctttcctctctgtaggtgatgctggcaaaaggcctaggggatccagctggggagggactgccagtcttcccagcaaccaaaatttgggggaggaccacgcctatctcttggaatatcatgttttttcgcttatcgtattggaggcttcattcattcattccctcccatctcaccaaatctcacctgtcccccaaagtcctctctaacctcatctcctactacccttctctcacatggtcccatgcagccacagtggccttcttgctgttctcccatagattgagctcatttctaccccaggcctttgcactatagctccctctgcctggaatgctcttcccccactctgggactgccctcctcattcaagcctcagctcccaggaaggggttggtgtgggcaaaagggagtgccattccttgcagacctcacaatccctaaggatctttattttattttattattgttattttaaaggcaggatctcactccatcacccaggctggagtgcagtagcacaatcatagctcactgcagcctcgaactgctgggctcaagggaacctcccgcctcagcctcctgagtagatgtaactatgggcaggacccaggcgcctggcttctaaggatcttaaacaagagttttcatgatataggtataagattattcactgcagcattgtttattcgatcaaaaagtttggaaacaacctcaatgtccatcaacagggaaaaattaactcaacagagggtcatttatatgcagctgtaaatatgaacactatgcagctgtaaaaagaacagagatggctcaatatgcataaatagggaacagtccccgaggtatgctgttagcaagcaaagcaccgcgagaacagaatgtataacaaactcccatttcaataaaacaaggaaaaaagaatatgtacatatatgcattcacttatatatggatatgttatttgtggaagcgatcacaggaaattggtaacagtggctgcccctggggaggaggacggggtggctgggggacagggtgggagagaacttttcactgtgtgcccttttgaacactttgactttcatactagggaaatatagtagctattcagaaaactgacattccagtatttttagaattttgaccttatctctaaatgggttaggtacacaaacagggacagaatgataacaacgaaaaaagactgcattcctcaaacaacactacccctgcatcccttactgaaccactcctagagaatgccatgggtttaaaatacgaatatataaacaaatcgaataaatcctggggttatcttgtgagttatgtgagttacacatttatattatgttgtgattttatgcaggttgtcacgatttgctcaatgttacatcttaaatgtactgcaactttagggatgtcttcattttgttgttgttttctttataaattaatattccaggagtctcaaaaaaatagaagtcttccaggcttctctccgctggagggaccctgtcccaattctccttagggagtgaaagagacaagggaggcccgagaacagggacagtaaacccgagttctcaggaggaacagcagcccacagtcccaatttaggtgctcccaggggatggggacaggctgaccaaggcacagaggcagggccaggcctacccctggggatgtagatctgctgaacatgggcaagagaaaattcccaccctgtgaagctggtcttgctgcggactggaggggaatgtctgtggtttttaagctgtctcctctggaaacagcatctcacagcgccgagctaggagtgctacccagttctgaacaattccagagcccaggctttttagccactaaatcaaagtgagagatgttgacttagtgtagccatggcctgatctgaatcgacgttaaagtttcccaacagcccatgagatggtagaaaggatgaaatgatactattaataatgtacacacgcttaactcattcatgaccatccccctgcgctggcttcaaaccctgtgtccagcctgtatctcacttgattctcccagccaccctaggaggtagcagtgttggtttcattattcccactttacagacaagaaagctgaggttccgagtggggaaggaacttgtctaaggtcacagagctaaggagtgtcatgcatagagtaaaagtctccaatccagagctccctctgattcaccacctggggaagccaggggtgggcctagctcggtgcctcagtgcccacggcatggatgggagaggcccctcatcaccaggcaggcagagtgcagggcagaggcggatgactctagtctagactgtcctgctgaggctggtgatgggggaggctcgctgagccaccagctacagggagtctcagaatatctaccacatcagcaagaccttccagatctgcctgcaggaggcacctggaacatgcccacctctcaccacccccagagatctgccctgggccaggccacatcctcttctacctgaatgattgtagttgcctcctcactgtctttctgcttccatcctggcccgtacaataaaacacagtccattctccagattcatccatacggatcctgttagaacctaagccagaccagggcacttttctttgctcaaaacacctccctatctcccagcatactgaggacaacagccaaagtccttagaacagcccacaaggctctgcagggcctggcccctccgtatctctctggcctgatcccctttactcctccccttgctcactcccctccagccatgctggcctcccctctgttcctggagcacaacaggcatggtctggcctcagggcctttgcacttgctgtgccctctgcctagaacactccagccccatatataggcctgtttcctttctttgtgtctttcaggtctctgcttaaatctcacatccccagaatggctctccctgaccactctatttcaaatggcacccacaccccatgaataccagtccccttactcctgacattttgcatatatgcagtgatattatatatttgtctcttatttctttagtgttctccttttgcttctagaatgcaagctttaagagccacaggtctttgttctttttcttgattgtattgttgtgtccttcatgcctagcaaggggctggcatacagtagacacaaattaaagaacaaacaaatgagttccaggtctccaggcagactcctcaggactccgggacaacagagagtcctctgaaatgtctcatgaatctctctctccatgaaaggcaaacccagcattacaccatgggttgggcagtttatggccacatgtccaggtggctgtagcaacaatactcattagtcagtgtatttttgtggttgaaggcaaggtacactctgtttcctcaaggtagtcaaacaaacaccatgagaactatgtggagcttgaaggaaactgtgagctccaaactttcctgccagaaaaggaaaccaaggctaagagaagtaaaataccttgcccaatgtctctcaccactaagaggaaaagtcagccctcaaactctggtcttctcaccatgaagccaagaaaagatcctcagaggacactggcactggtgatttgttgttaagacaaccatgcagataagcacagccctgctgatcagggcctgagaaaaacaaggattctaggtcttccaaacaacaaaggtggccagtcatgcagcaccatgagttcagggtgaggttacaactcattgtcaatgtgttcctggaagacatccagagagctctggacattttctcctaaaagctttggtgagaggagagggaagacgtgtttggaaacattctctggactccattaaagcagatgttctcgggacccaggccaccatgtgcatgatgtcctgctgactcacctgtgggtctccccagttcggagaaaacacgtggccaaggctgggcaagaaggtctggatttcctgcacagcccttcaaggaggtggggggtagggacactggcctgaggacagagaacagacaagctggggaaccacttcacatttggcctgctaggccacgtgacatttggccgaaaccaactttggccaatgtgaagttctaagaaatatcttgttctgggatgagcacttatggtgtaacagtcctgcagagcattttcttccaaaaccttctggcctactgacatgccatggacttgccaaccatgtgagtctcaaaacataatccccacattctctgccattcctccatcaagagacaaggcttttgtctcttccctttgagtttgggctctgcaactgcttgttcagtagaatatggcagaaatgacccagtgccagtttcaggacccagaccttgagaaactggtatctttcacttcctgctcattggtatgatcactcttggaaccagatgcctcctgtgaggaaactcaagccacctcatggaggggaactgtcagacagcaacatctttccagccctgcgagcaagtgagccccagttgagccgccccggtggaggctgtgtgcagagcagaaatgaaccaggcctgtccatcctggcccacactgcagattcacgagcaaataaatgttttgttttaagccactaagttttggagggtggtgtgttatgtggctgtagagaaatagaacatcttcccaactgggaaggaatttcctgggccctgcaggaacccaatccagatgtaggattttaataataacagagaggcctggggttattttaaggaagaccaataaatcaggtcaggaaacatcatctgctgacttccctctggcactccctagccttgtcaatgagaatagctgagaacagtctaggagtcttccctatttgagatagaatcctctgctaatcaaacacacctcgggatcctctatggccagggtggaggtggcaaaagtggagaacaaatgttttcccttaattcaggatcttatatatttttcacagaatgtggaattacctggtggctatcgtcctacttggactatcaaaggaaataaggccgctctataggcaagcatcagaaacctctccttctattcctttcctgttttatttattgtgtggggctgccatggagatggagctgggaagagacaggggaagttcagcctacaaaatctttgtgaagctgggtgcagtggcgcatgcctgtagtcccagctattcgggaggctgaggtgggaggggtgcttgagctcaggagatcaagtgtgctgtgagctctggttgcaccactgcactccagcctgggtaagagaatgagaccccatctctttttttttttttttttgagatggagtctcaccatgttgctcgggctggagtgcagtggtgcgatctcagctcactgcaacctctgcctcccaggttcaagtgattctcttgcctcagcctcccgagtagctgggattacaggtgcatgacaccatgcctggctaatttttgtattttcagtagagatggggttttaccgtgttcgtcaggctagtctcaaactcttgacttcaaatgatccgcccaccttggcctcccaaagtactgggattacaggtgtgagccaccgcgcccagcctgagatcccctctcttaaaaaaaaactgtgaatgcctctttttgttggagtagggtttggactggttctttgcttgcttttcatcaaagtgggtttgtcatgtgattttaaaagtctctaaaactctgcctgccaaagtatccatctgtcttattttatgttagctagaacaccccaaggggccaggatggcaggacaagctccaaggggtgatgtgggcaatagcagtcaatgtctgctctacacttgatggtgcacaagagcttttattctcatgatcttggaatatcctttcaggaatccagtgaaggtgactggacaaaaactatggtatgcctgtacaaaggaatactactcagcaataaaatggagtgagctactgatgcatgccacaccatggacggacctcaaaaccatgatactgagtgaaggcagccagatgcaaaaggccacacactgtatgatgccatttacgtgaaatgtcccaaagagacaaatccatagagaaagaaagcagcttggtggttgcctgggcctgggtgaaaggggtgtggggagtgaatgcaaattggcatggggtttcttttggaaatgttctgaaattggattgtagtgatggctgcacaatgctgtaaatttactaaaaattattgaattgcacacttaaaatgaatgaattttatggtataaagttccataaggctgtttaaaattttttatggtataaagctatttaaaaaaaaaaaaagaacagaggggagtcagagggaggggacaaggggtggagggtggagttgttagagcttcatggggcataggagataaatggatatgtactggctggaaaggatagaagctgtgattttcttagtcacctaactggggaaatcccagaacaggaggcctctgagttcctactagctgacaagtgataaaagctgagagtaataatgacaagtgctaacactgattaagtgccaggcacatgccaggcaactatacagagcatgttacaggtatgaacccatctgctcctccaagaagccctttgaagtggtattgggagataattctccatgggtctctccaaggtctgcatgtcttcagctcaaaagacactgagacctttgttctagactatcatctcaaggacatctgtgtagcaaacacacttggaggacagagacaatatctctctctggagcagaaagaagaggatagagttgtttcccaaccagtacaataatgtctctatctgaggcaaaggctagacaggtttggcaatagcccctttataagattgcaggtttcctaagctctgggatcctccattgagacacagatctgctgctgtgtgtgcagaatccatttgggttgttttcattgctctcatggaacttgggagacaattagaactgacgcaaatatgaagcttgtgctgcttgctatactgtgactaataaagtcctttgtctctgacctgggatctcgtgtcttctgccgtcatgtatggcattgtggcaggctaactcattagcttgtgagcagtgcaaaatctcggacccttcgtagttcttccgtcatactcacatcacccctgttttacagatgaggactttgaggcccagagaattgaagcttcttgttcaagatcacacagctaacaagtaacaaagctaggactgttacccagaccgattgggaaaggaaggagagatgagtaggggattggagaagagaaccgctggaaatgacaggagctgaaggccccaaaggtacacagaaggtcatgcctctcagcttcccaaacccacacacccccagatgctgcctgtccctacatccggctgctggggctgagcagccaatttgggacgaccgtgatatatttaacggtgagtcatgctctcccccagcaatcagcagtggcaggctcgggaggatgcagggagcatctctggaaatccgtgcctgagggtcgccatgacaacgccatctgagtcgcttgccagcagctgggatgccagtgcctgaaccaaggcacaaaatagtctcacaggctgagtgcggccgaggacaggagcaggccccctgcacggcatccccaatgggtttgccagggattgatgggagggatgtgaggacttggtgacaagggagattcatgggctcactgtccaggtcacagtactctatggaagcctggggtccctggctggtgggaatgagcacacttggcgtgatgggtattttggtgagcaccatctcttcctgccttggttcttcttggtttgtctgtctcatagttgctctcccagaggccctgcccaatttgaggcttctatccaagtgtcacaacctctgaagactgacagcaacttgggaaggtaaccaagatcatcttccaggataattctgaagacttcagaacctagggcgaatcagccacacccacacactaacaccaaatacgaatatcccatgaaagcagcttggaatccattcattcattcataaatccattcatcaccttgtcctctcagttgttcattttaattagaacctgggtcctacaggccctatgtagaagtggatttggttatcccgtcctcatcccctttcactccccctctcttattctactctagctcactagtcttactgctgttcctcaaacatacagttgcttttctgcctcagagcctttgcacttgctcctccatctgcctggaaagctcttcccccagaagggaagctctccctttaggtttctgctcatatgtcaccttctcagagacacactaccaagaccaccctaggagaaagcacctaattcagcctcagtgataaggccaaatatatatatatatatatattatgtataatatgacatatatctgtgacttagtttcccccatccgtacgaagcaaagagagacaagctgaaaattggtggcctgtaagttgaatctaactcacagacctgttttgtttggtttacatagtgtttcaagaactgagcaagttgctaacagttataaagttgagagattttgttttagaatgcaaattttcaatttatctcgaaaaactaaggttgggtgtggtggctcatgcctgtaatcctagcactctgagaggctgaggagggtggatcacttgagcccaaggagtttgagaccagcctggccaacaggacaaaacctcgtctctacaaaaaatacaaaaattagctgtgtgtgggggcatgtacctgtagtcccagctacttggaaggctgaggtgggaggatcacttgaggctgggaggttgaagctgcagtgagccatgatcatgctactgcactccatcctgggagacagagtgagaccctgtctcaaaaaaaaaaaaaaaaaaaaaagaaaagaaaagaaaacaaagaaaaatattaagctgtgcattctgcatctgtaaaagcaactggctgaggcatgagcattccagtgccaaaggccctatgtggacctcttcattcatttatgtggccatgttctacctatgggagtctttgggcttgcagcccaagtctctaatccgaggtctctaagggtctttggtttgggatggaaagagtgtggcatagtggttaagagtcaggccgatggggctgcaatcctcactcacttcagtgttcacagcttcagtttcctcacatgtagtatggaatctcagagagttaatgtgcgaactgaacaaaacaatgtacctggaaaaatgcttaacacagagcctaggaaatagaacacaataagtggaaacttaaaaaagagctttttctggcctttaatgacagtccattccttgatctgactcactaggtctcttcgatcagaaatttgggagacaaggaagggctgttttgctgcaattcacttgatgtcaaagcaggaaagacctcggacaaagcttcaagtctaaccttttttgttctcgggtgagtaaaccaagaccagaggatgagtcttgcccagaagagtttctaaccattcttcccccaggtatttgtttcccggtgaaatttgcttaaagttggaattggctgagtgtgggccagagctatgggcattgttgtgaacacttgcttttaactgcccagtatctacttgctctttatctgtaacagctccctgatttttccctggcaccatccctcttctgatccccaggaaatggctccaggtatgggcatgtggttcatgaccacagtggttggctcagagatggccatatgatgcaatccaggccaatgcatgtcaaccacagagctcttaggaactactggtacccactggagctgctgggctggttagatacaagcctggggctgctgagagccatttttgctatgacttggggagctgcctgcgaggatgccaacacaaaggaaaaaaggtccaggtgatggaggaaaacagaaaccttagaacataatttgagcaacttgattcagctgagcctgaaggcgtgtacccctgggcttttcagttacataagccaatcagtcccttctgccttcctctttttttgctacgatcagttagaatcaagattctggattcatccaggcatggtaggtgaaggtgttgggtaagcaaaggcccagaagcaggaaaatgcagaacaagttctgggatttccaatgaataacctgcagtgggaagaggccagtaaactcacttaaagccagaacctggggagctttgaatgccttgctaagtcactttgactttatcctaagggtaacagggagccatgggaaaggacctgccagagttggcaatggtgtggggcagtgggagtgaggattattctggatattaagtctggttcagggttctcctgggatccaactccagcccagagtgcatgcagtggtgagagagggtgtcttccctcagcacccgcagcttccagtccctcctgactgtcttataataacagtgttttcaatgcagaccttctgggttccctgccgcgaatcactcagccacccttccagggagaaaacaaaaagcagtgtttttccgtgtctattttaggctgctgcctacatctttgttcttcgtgaggaacacacactcccggggggcccttttctcagctgtggcccagcagtcgggtctggaccaccaggctgggttccgttatgggaaagaaccagcagatgtaatggaatcatgccaattaggccaggagctgcgtggggatgatgttatcattaagttccagaagacgtggaggtgagggggaaggtagctcattcccgtccacatggctatcccagacggactgccttttttgatctgtccccttcgactatcctgagcagctaggaagagcccacccttgctatcccctgagggacagaatttagaagtctgcattgtatgagacacttgtgctcattttactgttgggctgaaagcagaagtagaaattctatggcaaatgggtggatccagcccacccattttacagatggtaaaactgaggcctgaagaggaagcatagtttgttcaggtttatagaacatttggtggcaatctatgaccaaaaagaccagaacataaaatctcagagggcatgtaccttatctgtcttggtcaacatcgtgtcccatcacaaaacatagtacatggcaaataataggcccttgatatacattggatgaatgaacaacatctctactgctgttttcagctttcacaaagaattctctcacacattccctcatttcaacgtcatgattgtctttgtagccaagaattgcttttgtccttattttgcaggtgaggaaatggaagttaagagaggcttagttgcctatccgagatcacacagcctaggtagagactgaatttgaatccatgtcatcttgatgcaggctggggcatcacttaaattttggtagaggaagagaccttggaaatgtccagctgggaggtaaaagccttggtctacaaggacaactctgactttaattatactacaacatttggagtgaggggaacaagaaagcaggtcctcaaaaatgttcaaaagagttaccatatgacctagcaagtccacttctaggtatacatccaagagaattgaaaacctatgtctgtgcaaaaaattatacattcatagcagctttattcataataaccaaaaagtagagacaccccaaatgttcatcaactgatgaaagataaataaaatgtggcctatccatacaataaagtagtattcatccataaaaaggaacaaaaacggatacaagctgcactgtgggcgagccttgaaaacattttgctaagtgaaagaagttagtcacaaaaggccccatattgtatgattccatttatgagaaatgtccagaataggtacacctaacgagacagaaagtatagattactggttgccaggagatgaggggaggaaggaatggggggtgactgttaatgggtacagggtttctttttggggtgattagaatgttctaaaattagatgtgatgatggcttcacaactttttgaatatgctaaaaactattgaattatacattttaaatgggtgaattttatggcatttgaattataccccaatcaaacccttaaaaaaaataccaagaggagcatttccatggcaagggagttttagaagggggaacatacaaatgaggaagggtccccagcatggacagctccatgctgtcttcttggatgtcccaggaagaatttcaagaaagtatttcaacccccagctccaaggattcacctgagggcttgttcctatggagttgagaatctgtaggatacctcctccaggtaactctcccagatatcccaaccacagacaagaaaatgaactcatgataactgggcaccactcagtgccctggtgctctgcttgtgatatctcactgaagccatgcaacaaccttgctgaatgtgaggtagtaccatcacccttgttatccaggtgaagaaatggaagctcacagagataaaatgacttgtctggggtcacacagcttttggctctctcagctacatcatagtgcgtgggacacacccagagtaaggcctgaggccactttccgagggaacccaagcaagttccttgacactgtgggccttagtttccccatctgttccattaaatcccagcttactccttcattgtcctggtgggggcttcagccagagcatcaccacctgcctctgatataatggtgcttcacatttcatcagatttcatgtgaacaaagccaaacatcttttctcagtgcctcacctgcccagggatcctagtccacatctatgctgtttttctccactctgtccttccagtgcttggcacgctgtgccacttctcaaaaaaccctgatgttgcctgccattgggttcaaggcagatgatgtgatttcacaggctttcttcttcagcactaaataaggtgcttttgtggggcccttcctttacttctgatgctttaggttcaactttggagtttgtagacttgcagagaattttccatcaaagcgtacaggcagagatgcaaacacacacccttttatatctccatccatccatccattcattcacccatcaatccatttactcatccatccatccatccatccatccatccatcatccatccatccactcatccacccatccatttatccatccatccatccactcatctacacatccaattgcccatccatccacctactaatccatccattcatccactcattcatccatccactcatgcatccattaaatcatatattcatctactcatctatctacccattcatttattttcccatttcctttattcattcattaattcaataaatatttaccaaaagccgactatatgccaggcaccatgttggccaatggatacagtggaagaaaagacaaaatgaggttcttctcctcatggagctcacagtccactgaaggaagataggcctcaatagacacacaaaatgtaagcataaattgggatgaatgctaccaaaacaaagtccagaatgataaagatgcctaatttccattgggagatggaggaggcttttctgagaaagttgacatttaagatgagatctgaagtatgatttatgatttatcagttaggaatgctcttggtttaagaagtagaaaatgctaaccaaaagaggctccagcagttagggttatgatcccacataaccaaaagtcctgaaatagggttaccccatcactgagggacttgacaacatagttaaatatccagactctctaccatctactctaccaccctcagaggactggcttcattcccaggctggcttacttcatggacacaagatagctgcctctgctctggccatcaggtgaagacatgcccacattcatactcagaccatcacgagcaaaaggaatggggccaccatgattgtctcagatcagctgtttgcaactggccctgattttgcaccccaggggacgtttagaaacattttcagtggcataattatgtgtgtgttttgggggcattgctactggcatcttgtgggtagaggccagggatgttgctaggcatcctacagtgcacagtacagaccccatgagagataattattcagatgtcaatagtgcctgctttagaccagttagaacaaaatcctgagtcatggggcacacagtagaaaggcgtaggggaattgcttaagaaagctttcctggatgatgtaacagctcaactgagtcttgaaagatggacactggttaataaatccaggtaataaccagctggccacgtggatgagcaaaaacgcagcccttccctcttttctgcctcttctagtcgatgtgagccccatatggtcagggacctcacctgacccattcacttctccatccccattcccatttgatgcccattaccatagttgttcaacacattgttgtcaaagaatgagggactaaaatggggagaaaccctctctggaggctgaagccccaactttgaaaattcctgggagtcacacagagtgaatgttgggggcaatgactctggaataagtataggaggatatcagtcaacatgaggaaaccccaagaaaacatttggttcagtcctatcattgtacagatggggagactaagacacacaaaaggggagaaaatggttcaaggtcactcagaaagggggtcagacacagccagaacccatgtgcccctttcttaacccgtgatcaacagcagctggtggatcctgaacaattgtttagagactcacggtccagctgaacacagttccgagttcctgaatttgggcgtttcccacctcttatctccttagaaagctttcttcctggattcacttaccttgggaccccagaaggatgctgagtggggccaccttctgtgagtgtgtactctgctcagatggcaaaatggctaccaaactgcccaacccaaatggccggttcatggacacgttttgtttggtccatgtttgtttaattcttaaaaaaaaattattatttgcattctttgccaacaataaaaataattgggacagtgtgccttaatccaaatttcccacttctcttcggtaatcagaaggtttgacagcattgtgcccatttttctgcatggcagctatttacaggagttgggcagtggctgctccttttgtcaggatacaagtgccccatttcatcccagtgccctcctggctatatcactcttgtacagggctgcctggccccagcccagctgatgggacacaggcgtgagtagtgaggccatgcagggaccacaagcaggacactctccctctctcttggaaggaagcaccttggttaccatagcaacatgctgctgtttgtaacacatcttccacctgaaaaggagaggagatgacaagtacatctctcttctcagcccaggcaacatcagctcctggcaccccccaaaacctaagagcgagaagggggagtgtgatctgtcttctccaatctgggccccaaatgcagatgccccaaacacccccatttgttcaaccaacccagagatgaggcgttgggaggggttgatttagattccatcttatataaaaagaccagaacatttttgattagtgatggaggaaggtgtgggagtctgagacagtgctttgtttctgggcaaatgtacacattccctgatgcctctcttctctccacgtcctctaaagtagaagcatagactccctctccttactactcctcacagccaaattcccctcagccaggaccccagacctttcccaatacccaggagcccctagggcagcaggcctgtttctaggctacctacagaacctgaaggaaataagggaatgaaataagagaatcagccagaaataaggcagggcaccgtgcggtattttcctttgaaactaagaggctgagagctggaacagcagcagaaatcagaagaaatctcattgagaaaagaggcacagagaggagtgccaattagcacccaggtcccctcctgggagtgtcaatccataaatattaataaccgtaatcatccagtattagttataatgccttgtaaattaaggtcattttccgtggagtaaatagctgcgttaatggcagcaaaaggtaacggcgttgctggctgcatgccagttgatgcctgccaggatgacagtataaatcaggaaggacacgtccaatctgtgaagacaggcagtggcatgggggcaggtggagtgacggggcagagtgtggccgcagacacacatcccacgcaaggcccttgggccgatctgatctaacagggacctgctttagacaggtgatgtctggggcagatgaagctcccagggtcactaggtgtaggtaggaggggagagaaggggccgggtgggtagggagagggtgtctcagagggaggtggcaccaagacttcagacacttgggttaagagcagagggccacgctttgagctgctgcctgtggcatttcactgcagaccttggcgcctttgctaagcgacacagacattctcttcttcctctacctcctttccctcctctccatcttccttctcttcctctcctctcctcctgccagggctgacttctccattaggcccaatagacacagcctggggttcacactacctctagggccccttctccaatgttttaatttcttttataattagaagaaaaaaagaactttcagcaggaagaaaatgttgtaatactgtatgtgatattaatatattcatctttataccaatgtagccataatatagcatgtttgtttttttttcatggagagaggcctaagtgcccgggggccacaaaattcatcacatggccctactttctgctccccacccctcctcccactaaccacggggccctaagcaattagcattgccttatggagtctcggtttcatcctttgcaaatgggctaataatggtgatgccttcccaagcaggatgaagtaaaataatattagaaaaagctttggccacaaagtggtgtttgcctccttttcaggaggctctgggatcctgggagttaggcgggtgatgtatttgaaaatctcagtggatggagtccctggtaatgctccctatgggctccccaagctaaatgcaccgtcagacccttctctcgggtctgacccatcatcttcctgggctccctggtttctctaaagagcaaatgcttttcttgaccctctgagaaaactcacaaggcacttgagtatactagatggatcaaataatgcctttaaattccaacggaaagaaagcagccattatgacgggctccagcaaggggagggagttgggggcctccttgttcctttactgctgggactggacacactggggtttgcaatacccagtgcagatgaaaatgtggggacccttgttcaaaaactatggatttcatgacagtgacagcagagcctctaacaaagtgtggggcccttctgagaggggcgtctggtactactgcactggttgcacacccgtgacaaagcctgttgttagcttgcagctgggaggacgggtgtggcagtggccggggaggggacagcagtgatgatgatgctgtttgatttcccccaactccaccttcacctagtacagtgcctggcatgttgtaggtgcctaagaagttctagttcattctctcattcccctaacacagggcccaccatggcagatgaggcctgtccccaccagggtggaagctggatcactgggcccggcttggcacctggtaacgatccctctccagggggctgtgccctggatcctctctctcctccctcctccaccttcccccagaaagagtgatcctttattttactcctggcctatggtttttgtgttggcagaagtggaggtgcttatggccagcatagcctccaaactaaacactgcagaagtattgagtattattattatttttattatctaaatttgcaaactctgccccctcctattactcagctccttccttttcttctttacttttcttcactgcccttgtcccctcctgatattatagtgcatatctatctgcttgtgtgctatctgtctcccagaccgaagggtggactccacgaggacagggactttgtcttattcactctggaaccccagagttagcacagggctcagcacatcaaagacactcaataggtatttgtagaatgtacacacaaatcttggaaaggtgggcagggatgctgtgtgtcctggggccaggaagccacctctctgagtctccctttcctcacctgtaaaaaagaggtaacagcagctcttgcaaaggctgaggagcagatgaaaggaggccacaccctgcaaaggcactgtgagctggtgagggagtgcagcgatatcacagttcctagagcccggcctgcaaatctggccacagctgccagtcaacagcccaggctcggctaaggtgccataacttggtgcccaccttggattttcacacccagctggctactggccaccagatggcatagaaggttagtccaaccacctggcctgacctgggaggctgcccagcctcagagagcatccttcctagcgatcacctgggctctagacctcagcctggtcctggcctggagggcggtggagggggctcagccattcagactgctgtgtggactctcacctgacagcatgtcattcaatccactctgtcaagaaatactatgataacaatcagggaaatgcaagccaaaatcacagtgaaataccacttcacacccactaggatggctagaataaaaaagacagaacaagtgctggcaaggatgtagagggactggaaccctcatatatagctggaggaaatgtaaaatggcaaaatcactttggaaaacagtctgggagttcctctaaaggttaaacatagaattaccatatgatccagcaattccacttctaggtacataccaagagaaagaaaaacatatgtccacataaaaatttgtgcacaaatgttcatagcagcattattcatgatagcccaaagtggaaacaactcaaatgtccatcagctgatgaatggataaacaaaatgtggtatatccacataatggaagcttattcagccataaaaaggaatgaagtactgacgcatgctgcaacatggatataaaatcttgaaaacattatgctgagcaaaagaagccagacacaaaaggtcacttattgtgtgatttcatttacatgaagtgtccagaatagggcaatgtagagagataacaattaggttagtggctgcccagggctgggatggaggtggggagagatggagagtgactactaaggggtaggagtttcttcttgggatgataaaaatgttccgaaattgattatgatgatggttgcaccactctgtgtatgtactaaaaaccatcgaattgtacactttaatgggggtaaattgtagctttaatttaatgggtaaattgtacatctcaataatatctcaataaagctgttatatgtatatgtgtgtatggatttgaataaaatgcatttgtaaggcatctaatatgagccaagtgaagagcacaaaatctctgcttgctcaggaagctaaccatgaagagacagaggaacagatacaagtgcaatttgactcgaaatatgaaaagcgcaatttgactttaagaaaaataaagcgggctgggttagggttggccaggactggagttgctttagatggaggagaggcactgtggtccaaggaagacacactgaggaggtagcttttgaacagagacttgaatgaagagattgggtggggtggggcacagaaattgggtggaagagtatttgcaacaggagaaatagcaagtgcaaaggccctggggtgggagcactgagccagaggaagctaagaggtaaggagggagaactgatgggggctggaccctggagggccagggaggttctgccgagacccatggcttggttctgagtgaagtgggagccgtggagggctttgagcagaagagggacatgctctgacttaggtttgcaccaaatctctctggctgtgagtggagaatggactgtggggtggatgtgggcaggatggaagctgggagaccagtgactaggctactgaaatagaccaggtgagagacgaagggggctcggccagggggtggaggcggaggtgtgaagtggtcagatgctagttgtggactagcaattctatccatggaacctccacttgcagggatttttattgccatttaacttgacccagatgtcagctgagatcaaaagcttcctacctgatgaacagtctttgaatgcctcccaatcgccaaggtcaatcacagcccctccccagaacgctataaatgccggggtccttgcttcttctgtcccttgggttcaaatgtcctgaatccatctggatgctgtctcagcctctgccaccgatttccatgagaaactcaacccatcaaacatgttatcattctggcagacttaacagaagagtcaatagtagtaaacaccttgtaagattcttctccaggttagatgagttaatgtatgtaaaagcacttagaacagtgcctggcacatggttggcactcaatgaatgttcactcctattatttatttattttcattttagattcagggggtacatgtgcaggtttgttacacgggtatattttgtgatgcggaggtttgggcttctaacgatcccatcacccaagcagtgaacgtggtacccaacaggtagtttttcaatccttttccccctctccctcccctccttccccttttctggacttcccagtgcttatcgttcccatctttgtgtccgtatgtacccaatgttcagctctcacttataagtgagaacatgtggtatttgggtttccgtttctgcattaatacacttgggataatggcctccagctgcatccatgttgctgcaaaggatgtaatctcgttcttttttatggctgcagattgttattcttttagagacaggatctcgctctgtcacccaggctggagtgcagtggtgcgatcatagctcacggcagccttgaactcctgagcccaatccatcctcccgcctcagcctcctgagtagctgggactacaggaacgcaccaccacaccagactaatttttaagtttttgtttgtttgtttgtttttgtttttttttagagacagagtcttgtgatattgcccaggctggtcttgaactcctggcttcaagtaatcctcccgcttcagtctcccaaagtgctgggcttacaggtgagagccaccgtgccccgtcctggcttctgttattatcacgtggctagcgtaaggggtgttgggtaggtagctccctttctgggaaacattggccccatccacccacatccgatggggctctcccatttcaacaggtcttaagaagccatctcctcaacaaaagtgggcccctgggaggaattctcctgacagccactaaaacagtatgcttgacctgcatctcataacgcatccaggaggaaatgaaagcacagacagctggagaaccaggcccaaggtcacaaaacttaggtgtagcagagctgagaattcaatgtgcatttgatgctaagccaggtgataaaagaaggaaagccagttttattgagtgcatgttatattccaggcatctttgtatgcactgtgcttttatttatttatttatttattttatttaatttattttttgaggcacagtctcactctgtcacctgggctggagtgcagtggcgtgatctcggctccctgcaacctccacctcccaggttcaagtgattctcgtgcctcagcctcccaagtagctaggattacaggcatgtgccaccacacccagctaatttttgtatttttagtagagacgggggtttcaccatgctggccaggctggtcttgaactctcagcctctggtgattggctcgccttggtgtctcaaagggctgggattacaagcgtgagccactgtgctcagcctgcattgagtttttaaaaatttcactttttatataaattatattaattttgaagggcagtacctgcacacagtttgaaaatcaaaaaggtacaaaagggtacacagttaaaaagggggatcttcctcccgcccctgtcccctgtcaaccagctctctgcctcagaagtgactactattttgtttcttagggatctttccagtgacggactaggaatggcagaacctactagttgcccacccagtatccagcctccacctcctccttgctaacagaaccccaattttgctcacaggtggccatatgcccagataaaaacactcacattcctgactcccttgcagttagcagcagccatgtgacctggtctgtacagcgagatgtaggtggaagtccctgggcagggaatttcttttcactccctcaaaagtcaaagtgcccggaaaagaagacttttgtgtttttgttttgcttttgccctttgcccttaaaaaaaatttcttgcctgggtgagactccatctcaattaaaaatatatatatatattctgcctggaatgtggacttgatacctggaggtggaggagcagccaccttgagaccgtaaggatcagagacacgtactcagaatggggaaaggaaagaacgatgcttgagtccttcagcagctgcaccagtgctgcgctgcccggctctggacttactgtgtttgctcaagccatcgtctgttggatttttctcatccttgcagctacatgccttcttaactgaaaccgtgcctaaataagcatttgtatttatctatgttctttcttccccacaaaaacggtagcatatactccacctacccttcaggatcttacgtcttcacttaacaatatatcttgaaggttgttacaaataggtacacacagagctgccctgaacttttaaatgaatgtgtctaagaccttgtacagatgctccctagagtgttccaccaagtccctcttggtgtgggtcgttctcaacttcttgctatcacagataatactgcagagacaaaacagggacattgttcatatcccacatgtgagggtttgtcttcagaagaattgctgaatgcaagggcagatgctttttcagtgttcttagattttgtcaaatttccctgcaaagaagtctggctgacgtgcattccaccagcaatgtgggagtgtacccacacgttgtctctaatcctttcaacaacaaactagatggtgtccattttgctgaggctcagagaattgtacatggcctgcccaaagtcatcacaggcaactggtgagatggggatttgtaccagggtctgtctgatgtcaaagctgtgcttgtaaacacatgacattgcttttcaggcagcctggattccagagactctcagaaaagagggaagaacgaatctgacccaggcgctggtctgtacctgagaagagcctttgggctgggctgtggggaggcccgtgtttgtcctgggccgcgtcccagctcaggtctgtcatggccttgctgtgtgagcaagtcctgccccttaccctctctctgggcctcagtctttccacctgtcaaatggatggcttggagttgctggttcctaaaatcctttaatgttaggcttcttgaaaatccccaagtctgagggtatcttgggagctgcttttcagacctcaaaatggaaacagcgatttttcctctattcctgaccgagcagaggtcagcagcgtcaggggcatctacttctatctgtggactgaggtcacattccctgggggaggctgggccatggtggggcagcagtccgctgccctgttttctctgtagggtacatcttctcccagctctgacagccagattctgaggacaaatattccagttatggtttcagatactgagtattttccaaagtgatttacatatctaatctggaagagaggggctactcttatccccattttacagataaggaaacaggggcacagagagatcgatcaacttgtctgaggtcattcggccagtaagcggcagccaggatttggccccaggaagtctggtgcaagaatctgtgcccttcaccgagcatttctcaacctcgacctattggcgttttgggttggctcactcaggtagggggctgccttgtgcattctgggatgttcagcagcatctctggcctccacccactagatgccccctgggtatgacaaccaaaatgacccagacattgtcaagcgtcccctggaggtcaaaatcacctccagctgagaactatcttaacacagctctggagatgtggattctaggcccatctggggactcttgggtttttttttttttttttttttgagacagagtcttgctctgctgcctgggctggagggcagtggtgcgatctcagctcactgcaacctccacctcctgggttcaaacaattctcgtgtctcagcctcctgagtagctgagattacaggcatgtaccaccatgcctggctaatgtttttattttttgtagagacggggttttgccacgttggccaggctggtcttgaactcctcggttcaagtgatctacccactttggcctcccaaatgctgggcttacagatgtgagctaccgcacccagctgattcttaacccttctgagcctgcttcaggctctggaaagacactgacaaaggcctagagaagaaccttgcaagagggcaatgccctgtgcaggcgatagaagcgtcgcagggcagccttctctgaggctggcgatgggacaactcagcgaggggcattggcgggcagcaaagaaaaagcttgggtggtggaatgggcttggaggttggctgagtgaccttaggcaagtgctgagattctctgaccttaggcaagtgctttagattctctgagatgcagtcttctcagccaaaatcagagttaacccttgtagagttgaggtgtgatacttaaataaagtattgtcatgatgggtgaagaaaaacaaaaccaaaaactatatccacgaagagtctagttaaataatgtatggtacatctaagccatgaaagattatgcagccattaaaatgaatgaggtaaatctagtttttgctgatatggaaagatctctaaggcttatttatttatttattttttgagatggagtctcgctctgttgcccaggctggaatgaagtggcgcaatctcagcccactgcaacctctgcctcccgggttcaagtgattctcctgcctcagcctcccaagtagctgagactacaggcgcacgccaccatgcctggctaatttttgtatttttagtagagatgggtttcaccatgttggccaggatggtttcaatctcttgacttcgtgatccatccatcttggcctcccaaagtgctgggattacaggtgtaagccaccgcgcccggtggcttattcatttattaatagttaaaaagtaaggtacccaacagtatatatgacataatcccattggtattagaaataaaaataatctttctacatagccttattgagcacctactgcttgccaggaactggagtaagcaggaggaatacagtgtggataaaacaaaactcctatttccatggaggttggtgcaaaagcaattgcatcaacctaatataaagacgtgcaagaaaatggcttcttctgagcctggagatgtgggagtgagatttctgtctttccattgtatgccctctggtatttgaattagtcttactgttgaatgcatttatttatttatttatttagatggagttttgctctgttgcccaggctggagtgcagtggcacgatctcggctcactgtaacctctgcctcccgggttcaagctattctcccagcctcccgagtagctgggattacaggtgtgcgccacctggctaatttttttgtatttttagtagagacagggtttcatcatgttggccaggctggtctcaaactcctgacctcaaatgatccacccacctcagcttcccaaagtgctgggactacaggtgtgagtcactgtggccggctgaatgcatttattttaatgatcagtttttaaaagactggattaaaaaaatgagagagaaagcaacgagcagtgtttggctcaatgcaaatggttgcttttattattatcatagtaataaaacatttattaactgtctcttgagcacctactgtgtgccaggtactttgctaggtgctgaagatacgtagtgagcaagaaagataaaaatattggtcctcaggagcaggtgctctaggtggggggacacaggaatcagagaagtaactgcaaatgtcattagtgttacaacagttggggattatgatggcatcggaacctaacagaggggaggcttgcaggtctagggagttgcccagggatcggagcctgggctccagccctctatcctcaagcctgggcagttcacaaggttggacccctccatggcttcagagcaaacaaaaacagctaaaattgatggaatacatacagccaacaggcacactgtaaatactttacatgtattaacttacttagaatccttactacaaccctatggatactatttttatgctcattctagagatgagaaagtcaaggcacagagagattgagtaacttgctgaaggccacacagctagtaggtggcggaaccagaattcaaacccaggtattctgctacagatgccatacttataactacttcctttcatgactttcttctcctcttccctgcttatcagagccagtcctctgtctccctgtcctccccagacatgaggatgaccctctctggccccagctgcagcagaacatgcaaggattggaggacactctccaatcttcccctgtcccaggggctcctaaagtgtcctggttttgcccttggagcccaagtagaagaggggacgagggggagcaggagccagccaggtatacgctggtcccccgtctgcctgtccttcaggcataagaatctgggttactcctagagcccaagtgtccagattgattctaactccagcccctgaatgagccacaaactgagtcctaacccgggtcacactgaatcttgaccctggccgcacattccttcataaccctggtcctaggctaagccttgaccctggtcacacactgatccttaaccctagttgcatactgatccctgactctgatcacagactaactcctagtgtgatctatgacccaggtcatgtactgacctcagtctcagactgaaccctgatccttgtcaaggataagccctgaccctcatcacacactgagtcctgaccctgctcactggttgagctctgacgcaggacacagactgagctttgaccctggagagacactgagtcctggcactcctcactgactgatccctgatcctggccatagagtcaaccataatctggtcctagggtgaaccataatctttgtcacatattgatctctaaccctagtcatacactgagttcagccctggcctcagatgcccagccatctccaattgctgctgtctactgcccagggattcagagactcccagaatgccctcttcccacctttccccagagcttaaagtgattccactggcctgtgcagaggtcacccagcctgtcatccccggggcccatctgggggacctacagggctctaaaaaagacagggaaggcatgatttagacagagctaaattctcgagatgctgcttttcatctagaggctcccaaactcttcctatttctctctgtctcgtctcttcccccattcacacacatatttctcctgaaacaaaattcatcagcaaattctgtctttaagaagggaggtcagacagcagccagcccagcagctgggcagaattctattatcaggaggaaatgcagccagcaggaaggactgtgccctccctcccggcaaagtgttactcactctccccagcttggcttccttctgaagggctgtggagttcctgacaggtggaggtggtggacgtctgctgatgttgaccagggagcccgtgctcccaccggtggctggctgccccagacctggcccctgttctgggaatctgccccagtgtctgagcaacacaggggtgaagagtttgaaatggttccccaaggtgctttccaggattgcagggcctgggtagggccttacatattgggagagtccttgtggcctctttggggaaggatgtttcccccttaagacccctgaaaacaggggtgcaggatggatgaggaacacagggctcaccctccacccccatctccaggcagtgcaaacatgtgaaacatgaacacatgggcaggcgttgaggtttccactcagttccccctccctgctctggcagggaaaggacttttgctcctctgggccagggagccctggagggaggggagaggcatggttgctgaggctgggtgggggcttccagatgggtgtcacccatgcccttccgaccatctaggacagcctgggagttgtgtctagttaggagagtcaagagtcaagtatccagtgagctggtcattcggataccgaggtgggaaacaggtgatcagcctgacagtcatcttgtcagttagacgtagagacaggcagatgggcaggccgtcactcagccatttgatcaggcctgcagtcagacaagcaggctgacagacagacggtcagtcagtcagaggaggagatgaacagacaggcttcttcatctgttagtcagatacaatagatacccagcagacagacaggcagacagacagacatagacagacagacagacagacaggctgtccatcagccatcttgtcagtcagctatagagacagctagtcagtcagtcagacaggagatggacagctagtcttagttactcatctaattacagccagccaaacacccaggaagacagacagacagacactccaacaggcatttgaatgaggagatggagagaaaggcaatttgttttgcatctaattagtcaggtacaagagccgcagccaggtagacagggagagagtctctctgtctcagagagggacattcagtcagacatggaggcaggcaggcaggcaggcaggcaggcaggcacagccattcatccagtcagtcagctatcctgtctgtcaggctctcagacttgcggtggacaagtcagtcagtcagtgtccgtcagaaccaacctaccttctggccagtgatgcagctggccattatgacagacatccaggctgggcagagacaaacactggatgctatgaggaatgttaagaaatgggggtcctaagctcacagaataaccgggggtcccaacacccctctcaagagcctgatacagcccctcaacaatcagggaaagcattctggaagaggagggaagaggcaccccactccaagagccatccctcatctccctctgaagtgcctggcctccctctacaggccacaggcctagagaaggagctgtgtgtgtgtgtgtgtgtgcgtgtgtgtgtgtgtgtgtgtgtctcagctctgccaagttctcctcgcctccctcctccactggagtgggggttgggcggccctcccaggccacttcccattttgggaattgggctgagaactatgcaagagacagaaataattcctttttcgagcctggccagggctgtagcagcccaaacattggcacaaaaccagtgctggggaggggcccaggagggggcagccaggggtgggacggagccctggggcccagggacacaaaggcctgggtgtctccagaagaacctcctcatccagtcccagggctgggtacaggtacctggaagattcgagactcttagtggagctgccaggccagaaaatgttcgggattggggaggggaccaggttacagaaagaacaagaaagaagtcatagagtctccactggtaaagacaacttgaaaaatggaccatttctggtggccaagaagggatccctgctctctcctgagaacacatcccccgctatgggcagacccactgagcactcacataagagatggtggcctgggaagcacctagcacacagtaggtgcacactaaatgcaagtgtccttggaccagaatcgtacacaactagcttcgcagccctttggcactgcttcctagggtgtgaccctaggcaagtgacctcagctctctcagcctcacatttcccctctgtaaactgggagtaatggcaaaacccgcttcccggggtggctacgaggattaaatgacatgacaggtacagaaaatctagcacctagtaggtctgtgatctatttgagtccttcctcctttctttccttctttctcaaagcattattttcatctcactggggtcttacagcaatcagccaaggcagatcttgatcgtcattttccaagtgacaccctcctgaaatcagcccgtctcttagcctcagtgtcccccttgtgtaaaatgatagctcgggacaggagatgtctggaaagccctttcagagcctcagcgctagagtcgctggtgatcctcaatgcttgattgcatcattcccagcatgcaggggcccttcccaaccactccgtggggatccctgtggttctgaggaagctgaccctgccccctgccccagggataagccagtcagcacatggcatcccccagctagagagcttgctgagtggggcatgtgattcaagctaagccaatttattgacttctgagctttggccaggaatgctgggagttcccttctcttctggataacgtagagtgcatgtgtgacgcctagaaatgctgcagcctttgggactcccatgaggggagccagcccaagagaaaaattggctcacagaggaggacaaagcagagtaaatccttgacacaatgatgacatcatgatcccctccctacccttgctacacactgcctgggcttttcagttgcactatccaataaatgccctttattgtccatgccagtttcatttgactttcagtttcctgcacccaaatacaccccaaaagacccaaatacaccccaacagtctagacttattgccagttttaatcctcaatgtgactcttctacatagatactattgttcttcccattttagagatgaggaaactgaggctcagagagtgaagtgacttgtctgaaatctcacagccagaaactgtcagtgctgggatttgaacctggaaatgccttatgctcttctcaccatgttataagaccttctcttttctcatctatctctgggcaagtgggagggagtaaaacagtaacagccaccaccaaactccagtaataatcatcccagggaagaccaatcacataacatcaaagcctggaagacgcttagagatcattcagcacaaccctccatttcacaaatgaggagactgaggaccagagcggggaagagacacaggcagcaggaggcagattgggagccagagcctgggacagcaagaggacattgttcctgcaagggcagaggagtcacctgctgctcatacctggaggaagagggggcttctttttagcaacaaaccatctcaccctttgggggaactatcccttcccagctctcaagccacgtggcttgtagcctggcctcacctctggctccaggtctggccaatcagaacggtgcattcccctggcaacaacgattggcagagtctgggcatgtgaccccaatcaagccaatcagagtgaaccctgggacttgtcatgggactaccggaaagagaagctccagcattctaatggagctccgccttcagcacaggtaaggacaggctccaggctcagagctgccagttcgagtttaataacctagtttatttttgtggtattcatttttaaccctgtgttcaatttaaggtgattaactccatacagtttgccagaaccatctaggttttaaaactgaaagttcacaggtgaatggaggcaagggtggttggtcacccctgcttcaacttatgggtatcagatactggttttccattaatggcagcttccttttaaaataaacatttgaatttaaaaaggggccggacgcagtggctcacgcctgtaatcccagcactttgggaggccgaggcgggcagatcatttgaggccaggggtttgagaccagcctggccaacatggcgaaaccccatctctactaaaaatacaaaaattagccgggcgtggtggtgcacgcctgtaatcccggctattcgggaagctgaggcaggagaatcgcttgaacctgggaggcggaggttgcagtgaaccaagatcgtgcaactgcagtccagcctgggcgacagagcaagactccgcatcaaaataataatagtaaaaataaaacaaaataattttaaaaatttaaaaagagagtcacttgagggaaaataccaagaaactaatagtacctttggtgaaaagaaatggcaaaaatattgtgaatactgtgtcatgtgagtgagtgatggtgttgagaaatgtacaatgcctgcaagtctggaaacccaagctcagttcctgggttggtggcccactggccgtttgactctaaacaggttgcttgccctctccgagcctccacatcatcccaagctcacaaggccaaccatcctcagaggtggggagaggtcagagggcaggcaggctctgttgtgggcaggcaggctctgttcacccttatcctcttaagggtgaggtcttaaggtatgagttgctcccagtgcaaaagctggcaccaacagcagcaactcacaaatctttggagaggcccggcattccccactcagtgactgctgagtttgactgatggggccatgtcggcaaattagccaccattcagcagagacaccctttagagatgctaattgcccagtgctcatgcgtccccacccctccctggcacaggcggctggctgtcgatcccctgccattattgtctgataacagtgcttgatttgtctacacagaccagggcccctgcatgcatgctgttagcatctaactaccagccagcacggcgcatgaagcacggttcattaatgctcttgaggggagcaaacaggtgctggcagaaatctattcccgtggacaaatctgtggacacgtgcaccctcatacgtgcccacttagcccccaagtataggaatgagtcagtgtcacgtgtgcatatgcattctgtgaactactcatacgccggctaagaagcagcctcagacacatacgcacaggatggagtacatgcatgtacataacaggcaatgctacatggggttgtgttaggattacattacagaacacctgtaaggcgtcttgaacagcgcccggcatgtggttaattactcctcagtaaattagatctcttattattttttcccagtgctcctttatttattgaggtataacttacacataataaaatgcacaagttttaagtgtttagtgcagtgccttttgataaatagatacacttgtgtacccaccaactcagttaaggtccagaatatttccatcatccaggaagttctctcgggttcccttccagtcaatacctccaaaagcaatcactgttctgatttctcttgttatagttgaattttgcttgttcttgagcctcatataaatggaatcatatggtgtgtccttcttggcaatgcctattgtggatgctcagatgtgtgcacagccactcacacttacacacatgtgcatggatactcagtcagactcattcagaaatggggatttctgagctgtaaatcccttggcctcagcttgcagttcagctaagcctctctgggttcagaggactaaaggagatggggagagcccctgatgctgggtccagccaccgtggggggctccttccacattttcttcagcttcccttactgagtgacctcagacaagaactgaaaatctgttttctcctgtgaaatgaaatgaataataataacatacagctcataactcccctgtattgagcacttattatgcagtaggcactgttctaaggactgcgcaagttcgagtccactctgtcctcccagcaaccctataatccaggtatcatcattacctgtcttatgggaaaggaacctgaggcacagagaggcccagcagcttgtctgaggtcacacaggaaggggcagagctgcgatttggacccggtccagctccagagccttcacctgccaccattatccctctttatgaagggattatgagaattattgattatgtccatgccttggaacccagtaggtgctaaataagtattgcataagattactaccaagaacatttacatccactatctcactgatgcctcagaacagccccattttacagatgaggaaactgaggctcagaagtcagtggcaaaagattctggtcttctggttctaaatcccacattctttctattcccccagctggggatattctattccacaaggcagatgctttgttttgtttgctgctatgtcctcagcacctagaagagtgcctggcacatacttgacactcaatacatgttttccaatgaatgagtacagcagggagttgggaggaatcacccagcccaatgccctcccgttacagctgggggacccaagacctatagagaggatgtgactcatccaaggtcacacagcatcttggtgccgttgaagctattgttttctcccttgcctggctcacctcctctacccttgggcctgagcaagccaaaagatttgggagcccctgaggctctctcaaaggccacgttaatggggagctggcatggagcctctcccaacttcattaagccatccaaggtcagcacggaagcctgccaagctaaccctcagaaaacgccggctgaaaggaaacaaggcttgccagagcttttgcgctgggatggggaccattcctggcaaacaaggtggggagggaggaccgggccagcctttcaaagcccttcgtgaacaaatgcttggactgcagcctgctctggtcattgtcccctccaagtcagcagaaacagccaaactcttcagtctagcagggaaaatggagaatggactggagtctgtgtgtgtggggacagtgccaatgagagcccaccctgaagatggaagggaaaaggcaggaagatggtgaagctaggtagggggagaccatcccatcctgagggtaactcttagttgccagtccccagcccttgggcatggaggtcagttttaaataacactgattggccgggcacggtggctcacgcctgtaatcccagcactttgggaagcaaaggccagcggatcacgaggtcaggagatcgagaccatcttggctaacatggcgaaaccccgtctctactaaaaatacaaaaaaattagccaggtgtggtggcgggcgcctgtagtcccagctgcttgggaggctgaagcaggagaatggcgagaacctgggaggcggagcttgcagtgagccaagactgcaccactgcactccagcctgggagacagcaagactccgtctcaaaaaaaaaaaaaaaaaaaaaaaaataacaccgatcacctcccttcatgtcagggcatccctaaaagcagagcctgagacagggattcttaggcacgtgattcattcttgctccacgtctcctttaggagatgggggagagagagaagcaggacaggatagggaaggagctaagccaggatgtagcctcagctgaggtctagcttcggcctgaattgcaccaggtgttgatcccaccttgcagaaagagggctgagcttttgtacccctgactcaatgagtccacagtctgcctggtgggaggacgggagagctgccacaggttaaaatcccctggcaggcgactcccatgggccaagggcaattgtgagaggcaggagtcgtgagaagggggcagtggtgaactgttagcagcggggaatgccagcagttggggtgtgggtgcaccagctcgtaaatggagtgtaggtgaggaactcacagtgtccaccacactggctgtcctcttttcttttaaatttaaaatgtgtgtattttttatttttgtgggtacttagtaggggtatctatggggtacatgaaatgttttgatccaggcatgcaatgcctcataatcgtatgatggaggacggggtatccatcccctgaaacatttacctttgtgttataaacaatccaattacactcttttagttattttaaaatgttgggtgtcctcttattgtattaattcatcactacctaaacctcccaaacttagggtcaacccttagaagaaaagggagactgaattgaaccaagatacagtttccaccaccctccatcacggccattgcatccagtgtacgaacaaaacaacagccctgctcacacatctaggctcacagcatgcaagctgtgcctattccagttgtaggactctagaaccttcaagacactgagggcagaacttcagaattgtagctttcaggctctctgagctaatgtacccacaaagggggcctccccaggggaagacagaatggggcctggctcgaggaccaggctgggcagatgaagttacaaggtgaggaaagacaaggtggcttgaccaggtctcacgggaggccccacgacagaccgtggagaggatggcgagacctgagattgtgagaaggtgtaggaaattaggtaccagtggagcagccttggggtaggtgaggacctggctgcagccctgaccccagctgcaaaacgacctggatgcttcggctctgagtagcgcttagagcagggccacacttcaacaccacccatgccaaactgaacccctttcacctgggtacagcactctacagtgagcaaacaatctaatagctcagcatctggaggtgggtgagttgggggctaaatttgacgcagggggaaactgaggcctagagaagtgcactaacttacttcactagcaaattctgatgaagcacctactctgtgccaggcactaattcaggtcctgagatacttcagtaaacaaaagagaaacccctgcccacatggagcacatattcaggtgggcgaggagggggttggggaaggaagtaattattgctgtggagaaaaagaatgaagcagggaagggagataagaaggcaggagggctgggcgcggtggctcacacctgtgatcccaacactttgggaggctgaggcaggcagatcacttgaggccaggagtttgagaccagcctggccaacatggcaaaaccccatctctactaaaagtacaaaaaaatcagccagaatgtggtggtgcttgcctgtaatcccagctactcgggaggctgaggcacgagaaaattgcttgaacccgggaggcggaggttgcagtgagccgagatggcaccactgcactccagcctgggcgacagagtgagacactgcctcaaaaaaaaaaaaaaggaaggctgggggtggaaactgccatttgaaaatagagggtcagggaaggtgtcacttcctaaagagaggatgcttgaataagaacttggaggtgagagaagtcgtgcagggaacagcgggaatagccgatgctaagctcccccaggtagatttgcaatgggagacggagagatgaggtcagagaggtcttgtaggggcaggtcctgcagggccatgaggactttgctgttacactgagtgatatgggagccactggaaggctttgagtgggaggtgacatgacctgacgtgggttctcacaggatccctctggctttcagggaagcgtgtgagtgtggatgcaggtgagcagcgagaaagtaactgtaatagtccaggtgagaaatgacagtggcttgctctaaagtagaatttttttttttttttttttttttttttttttttgtgagacagggtcttactctttcacccaggctggagcgtagtggtgcaatcatggattactgcagcctcaacctctggggcccaagtgatcctcccattttagcctctcaagtagctgggaccacaggcatgtgccaccatgcccggctaattttttgaaattattttttgtagagatggggtctcaatatgttacccaggctggtcttgaacccctgggctcaagtgatcctcctgcctcagcttcccaaagtgctgggattacaggcacaagccaccgtacctggtcctaaagtagagtttctcaacttcagcactatcatcatttgggctgaatgaatctttgttgtggggctgtcctgtgcactgtggatgtttagcggcatcccggcatctacccactaggtgccaatagtaccatcccacctggtatgataccaaaaatatctccagacaatgccaaatgctctctgaggggcaaaaatcaccccccgttgagaacttctggtctggagcaggagtcagccagctatggctcacgggccaaatgcaacctgccacctgcttgtacaacccgagagcaagctgagagcagatttcacatttttaaatggttccgttttaagtgattatgtaagtacctacagaatatcctcaattttgcctcttggcctgcaaacctcaaatatttactatctggccctttcaagaaaagcgtgccgactcttggtcaggagtgttcatgggggtgatgaaaaggggttggaggctgatacactttgaaagcagggccttgggatttatgcagaggtcccacacggagtgtgaacaaaggaggagtcatgagtagctcccaggtttttggcctctgtggctggaaagagatactgagatggggggaaatcggcaggagcgagttcgcagtgggaggacgtggggcttagttttggagatgttaagtttgaggaatgtcacatagacaggggaaggacaccagctttggagttaggcagggtcattgtctgaatcccagctctgccgtggactcactgcagaacctcaggtaaagaaggacttgcctctctgagcctcagtttcctcacctgcaaaaaggagggcatgtttcgtgtgggctggatctctggataaggggcttttatgatgaacactgaggcataggcaatatgcttttaaagtgttttgaggatcacctgcgtcagaatcagttgagatccttgttagggatgcagatcctgggctgcctctagagactttgattctgtggtctgggcgatggacccggaatctgaactgcctgggttttgagaactcctgacctagggcttgggtgtccaattaaagagcctgtggctgcctctcaagacttgcaggttcccaagtggaaatgtctttaaagatcacagagcccagcagcctacccccgttaggcaaatgagaaacccgaagaccagagaagccgagtgccttgcctgaggccacacagctgggaagcagcagagctgggtctgggatggttgatggataggtggaaaggtaacagctggttcaggtaacaagcaattggatccagacagtgcgggtaggatccaggtcagagttgaatttcattttgggaatcaaatccttctggacttgggagagagacatgtggtttcttcccatttgagagtgttaaatgactctcccagactcctgttcagctaatgctttggagaaacaggagcccattttctgtgacactctttggccagccaggccaccccagtctccaataagccccttcctgcagcccaatggacttgctgaacccttgtgggtagcaatgtggggcacacaccaccagtattagttacattgaaatctggatttctcaaccttggctgcacagtggaatcaccttgcgagctttgaaaaacaccaatccctgggtcccatccccagagatcccgatttcacaggtctggcgggtggtctggcattgggatttttcaaagatcctcagctgattctcatgtgcagccaagactggtttagctgcccagggacaagccatcagaatcacattgattcacagagtgagaaggtgctaccctttccaattgtcttcagacccccagactccctgaagtggaaagtcccagtatgaagccagtgacattttaacacctctctaacacacatcttcccttttaacccagagagtaggtatcaggcttcagcatctggctggaattttatgacatgatttatggcaaatggcaccagttcttcataatatcaaatttcctgttaaaacaactcgatttagtaaaattaatgacttaatctaaagaagactattaagcaaatcctatttcaggtatttcccctggacctaatggtggtctctgacccaaactggttccctcactcatgatcccttctggccacagggattggctcagagatgatcatgtggctcaagtctgtccagtcagaggcaatcttcatgggaagagtcaggaaaaaaatggccattttatctgctggccttcatgctgggagggtggaatctggaggcaatgtcagctgagagatgaggaatgactttccaaggccaccggcattagtggtggagcagggatttgaactaggcccacctgcccacaaaggtagtacaacttcccgctaaaccacatttctggtgaattccctgggattcttcattttatttctttccttttcttttttgttttttagacagagtcttgctctgttgcctaggctggagtacagtggccctatctcggctcactgcaagctcctcctcccgggttcacaccagtctcctgcctcagcctcccgagtagctgggattacaggcatccgccaccacgcccggctaattttttgtatttttagtagagacagggtttcaccttgttagccaggctagtctcaatctcctgacctcgtgatctgcccgcctcggcctcccaaagtgctgggattataggcgtgagccactgcctatagttccctcagaacttctgtttcctgggttttgagtcttcatacgtagggtttacttaagtaaaatgtaatggcaccccataaaatataacccaaataggtacctttgaaaagctgatagaagacactgtaatgatcattcaacacattctgggcactggagaaggtatttggccacttgtaaagaatttagtgccctgtgctttcagtggatgataagaaacttctggctggagttcgagctgaacatttcagaccatctcaccactcctcaaccaaaggaaggtgaattgtggtttctgccaactttgactaacctctgaattcatccatccattcatccagcaaaattttatggaagatttgcatggaggtaggcaaagtgctagatgcaggagagacatgcctatagcagacaaggtcctactactggggagatcacagcccagatggggaggcaggcgctaatcagatcgttgcttaaacctatgtgaaattacaactggaatggaggccacccaagagagacacagagaactttgaaaatccataactgggggatctgacctattgagagattaggaaaggcttgcaggaggaggtggcattctatctgggagctctagggtgaggaggcaaataactggatgaagaagagaggaagagcattcgaggcagagggaacagcatgtgcaaagactcaaggcaggaaggaatttataatagtaagtatgagatcagcatggctggacacggggaggcaggagatggtagtggaagatgaagtcagagagtgttaaatgactctggcctcatggagtcttataggccactgtgaggaaatttaccctctcctcccaacccgttctgcagcaaatcaaacagaaaactcccacctttccatccaccctcgcttatagcataaggatgtgaaaaaattccactgctcttacgatttttgcaatttgaaaaatagaacaacgcatccatacaattggggttgcttataacttggggagtttgagttacttaaggagaaaaggaagaagagcaaagagaaaggcaagaagactaagaataaaaggaagaagtaagtgaggagaaggctgtggggaggaaacggagtggacaggggagggggtgtagtggttcagggcctgggctctgggggtaacaactggggttcaaatgctaccctgccacctgttagctgcatccttgcatgtgttacttaacctctctgggactcagtttccacatctgtaaaatagggataataataataccttccttataggatgtcgtaagggttaaatgaggcgatgtgtgtaaaacgtggtatatgagtgttagctattttgccattgtcttcagaggctgggttgcaccctctaacctctgcagtgtcctgggggaagccatagacttagcctggacagctggacggtgagaggaaacagagaaccccattgtgatggggctagtatgggacaggctttggagaggcagctaagaaatcttcctgggagaccaaaattcctccctgctagagcgagaatgcctcatttctgggagaagaagcgagtttctgcatttttcttagtgatagggaaagggctctggctacctccctcataaagaacctccagttcagggaagatttatccccacagtgatgaacactggaacccaaaacagtgaccaaggggatctatggataaactcttgcaagaaataccagggcctatcatggagggaatgacatcacgttcagtaagttaggggtgggatgtttaggcagagccctgaagcatgagtaagggaggccaagggagccagggtaggggccataagatcatcctagtcagatggcagcatgtgcaaaggccctgagttgtgacccagcaccacgtgctgacgctctgagaaagctatctagtacagctaggagaaaaaaaggggcaagataacaggcatgtgttacgaaggtagggtggtagaccttccagggccttggtggccagaaaaagattttggaagttatcccgagagcaacaagaagccgtggagtgaccaatccctctccctcctgctgtttcccctcacccccatccacaaaatctggagacacagcgaacaggcttggaggtgggccatgcatggaatgatttgggaactcagaaaactctaatactgtctctgaaggggtaataatcatccatccattcattcattcatccactcaacaaatatttattacttgctctgtgtgaggcacagttttaggcactggggagtgagcagtaaaatttgaccaagttcctttctaatggagctgatactgtagtgaaatgagacagataagagccagataaacctataagataacacgtggcaaaagggctatgaaaaaaataaaggaaggccgagaaatggagcataaaggcagggacgggaggtgtgttacaatttccttgcgaacatgaccaagccaatccttcctgcccgcccttgttccactgagcactcattacttgcaccatcataaatacagtttaaagattattttttagctccctccaccccatgagcaataaacctccctctccagttggcaccaacagtacacttgtggtgaccgcagtgaccaacaaactgttgcacttccccacgttctgctgccagcccatctcccgggctggaaagccgcaagcccttggcactttcttctgccccttgcctgacagtgtttgcctttctttggatgatggagcagtgagatcatccaggtgccccccaggggcttggcagagctgcttacttggatctgctccaggtcagccaacaagatggatttaagggtggatttaaacagagttgacaacaggttccagggtctttggcaggggtggggtaagggggccacactttggtcaccttcctgaggatcctgtcgcccttatcagcacgacctgagtggatgggcatcagacacaataagagagagaggcctatgtatcaggaccccgctggataaatgggggtttggggatcttctgtgatttgcatttcttcaataactgctgccaggaagacggatgatgaagggttaaggacacacagaagagatgagactcccaatataacaagcagggaataagacttccaactccaaacaccagtcttctgaatgtgcctgccagaattctgatcatgaagactgccgaagtgttctgaccttgaacctcagaattccaaccccgtacattagttccaacctgggacatcagcattctgaccttgcccgctagagttttaattatgaagagcaactctctggccatggactccttggctccaatgatggattagaggattctgacctcagatggcagttgtctgatcttgaacttcagagttgtgaccttgaatgatgttgctccaatactggacacaacagcagcaatcttgagcaccagaatcccaatcctgggccccctaatctctactgaatctctcaatgcccaagctttccagcctgaaatagtagagctgacatgactccacaggatacaaagtttaattctacacaataagcttttccacaggcccacagcccctagaaataagccaaatgcttcgatgatgataatgatgatgatgatgatgatgatgatgataacaacacaaataatactggcttacatctgttacacatcaggcactttgctgtgcactttacatgtttcatcttatccatcctctgggtcaccccagggatcttattattcccattttacagattaggaacctgaggcctagagccagttcagtttgctgacgtgacatcgagagctttttctagccactgcagtagctgtttcttcctgccctggttggagattgggtttgggaagttgtaactcattagctaatcaatttacgatttgcctgagaatttccccgacttgtgttgccatccatcaggcatgaactgccttgatttttggagccaagtcccgccttggggggatagtcattcattcaacaaagatttgccacccgaggttgtgcttgatgccagaaataagaagagggaaggtgggatatgatggttgattttatgtgtgaatccgactgcgccatggggtggccagattaaacatttatttgtgtgtctgtgcaggtgtttctggatgagattagtatttcagtcggtggactcagaaaagtacctagccctgcccaatgtgaatggacatcatccaagcctctgagagcctgaatagaaaaaaaagaggcagaggacggagaaatttgccccttttgcttcctgcctgccttctgagctgggacatgggtcttctcctgcctttgcactgggatttataccatcggcttctctggttctcaggcattgggactcagaccaaattacatcaccagctttctcctgaatgttcagattgtggaacttctcagcctccttactcatgtgagccaactcctcagaataaatgtcttactgggaagctgggcatgggggctcacgcgtgtaacccagctattttggaggtcaaggcggaaggattgcttgaggccaggagttcgaggctgcagtgagctataattgtgccacagcattccagcctggatgacagagtgagacccggtctctcaaataaatgaataaataaacaaatctcttagtgattctgtttctctggagaaccttaattaatacaggggacctattgcttctgtcatccaagctctgtctctttcctcccttccaggtgggggcctcagaggcaagaaatgcacccccaacatttccagccacgtgaaggctctatgctccagaggtcaaaaattagagccacgagggctgcatatggttccaaacatattctgtttggcccactcaaattgttttcaattattttttttgagacaggaaaacaatggagcttcctgacatgtgacactgatgctgtttcactcaacaagcaaaaggtacctgcttcactcttcattttaaaatggaaattgaaaccataccgagatacccgcttccatctgttagagtgacaaaaaaatcagaaagttcacaatacatggtgctgatgaagttgtggggaaacaggcaccctcacacatcgttggtgggagaataaattggtacaacctctacaaagtgcagtttggtcatatggatcaaaatgtaaaatgcacaaatctgttataaaatctgacttccagagatttctcccacagatatactcacagacacacacacacacacacacagatgttaagtgcaaagacagtcaccacagtattggagtttttgttgttgttgttgttgttgttgttttgagacggtgtcacgctctgtcacccaggctggagtgcagtggcgcgatctcggctcactgcaagctccgcctcctgggttcacgccattctcctgcctcagcctcccgagtagctgggactacaggcgcctgccaccacacccggctaattttttttttttttgtatttttagtagacacggggtttcactgtgttagccaggatggtttcgatctcctgacctcgtgatcagcccgcctcagccacccaaagtgctaggattacaggcgtgagccaccgcacccggccttttgttgttgttttgagacagggtcttgctctgtcacccagactggattgccgtagtacaatcatggctcactgcagccttgactccctgggctcaagcaatccccccacctcagtttcctgagtagctgggaccacaggcacatgccaccacacctggctactttttgtagagatggggtctcactaagttgcccaggctggtctcaaactcctgggctcaagggatcctcccaccttggcctccgtaagtgctgggattacaggaatgagacactgcacttgggcatgtttttaacttttaaaatgatttgccaacgttgaaaaaccgggatagctcccatgaaaattaaaatttctggctaagtccagacccagtctggagctgaatggctgctgccttctcaggcaggcttctgctccagttcaccactagccccctccactccctgcctgaaaagtggctggccatggaataggcatgttaggctgggtgttgaccagtgtcctccttgaacttgccctcctacagttcttccagcaactgcttcactgggtgacaaggcctacctagctccggtagccatcagagtctgaggccccggctcttgcctaggcagggaggttaaggccttctcctcctaacccataaggacctctgagtcattctgccctgcgggcagagctggcttcaagggtgtgcaacctgcacagttgcacagggccctgcgctcacaagggctccatgctcggtttgctactctgctatcaccatctcaaaattctttcttacttttgaacaaggggactgcatttttatattgtacggcaccccacgaattctgtagctggccctgccagtaggtcacttggtaattagggacacccagtcccccatacaccctgcccccaaggactgctctcatccatctagaaaaccacctctttggattggccagttctcccaggcatgaggccagcaagggtcccaaatttttatacaagaggggcttggggacagtaacctggggtggggaggggaacaagaggacttttcttgggttgcatttgcatagagctttatgtaacatggaggacgctccatcaaagaatgggggagtgtgatggggcctgggggtgggaggtggaggaagtatctaacacttcctctccaaccattccttggcacagtcattgcatgaagggtttgagcaggcaagggtatcatcaggggcaggactaaagcaaggtcaggggtagactctcttgaggagaggaaggagagaaggaaaaacaacttaacacgaatgaagtacctgtgctcagcccagcacagtgctgggccctctggcacggttaagtacacctgtctttccagtagctttgcttggtaaagtcaccatgcccgttttccagccaaggaaatggaaactcagagagaagaagggtctgcccagggtctcattgctcatatgtggggagtatgaacccagacctccagagttccaaaccagagctctttccacctaccctgccagggagacggcacatgagaggaggaaaaacattggtgcagagaaagggaaagatgcctaccccaagtgggcataatctcaaaataaaccagagaaacatgttatgatgggaagactgtaaacattaccaagtccaaactggccattcaaggtcagggagggcctctctgaagaggtgacctatgagctgagatctgaagaaggagaaggggctggctgacactgcaagatatgaagccagaggcccagagaagttaagtgattcactcaaggtcacacagctagcttgcatcttccttcccaccaatccacccacaaacacccaataagcccctcctctgcaccaggccctgatgcaacttcagaacacaggtcagcaaactttttctataaaggtttagataataaatgcgttttaggctttatggccatacatccaaaagcagctgtacatggcaggtgaatgaataggcctgcctgtgttccattaaaaccgtatttacaaaacaggcagcccacccaccctgttttgagcacagaagtgagtaagatacagtcttagactttgagaacatcctgttttatgtggagagatgaaacaagttaagaagaaaatagaatacgagagagagcacactgaacagtgcaggataagcggaatggcgatcttataggagaaagatcactcctgtagctcagcagggcagacatcaagttcaggctctcagaaaagtgcacgctctcagaaaagttcacatacactgagaagttttctttgaccttgccccattaatctctgtcaaaacaccttgtttctctccttccaacatacatattacacttagtgtgattattctttcatttaatttttaatttgtttaatgcgtatctccctccagtaggttataaactctatgatggccatggattatttctgccggtttacatttattctccccactcttggtaagaggacttcaatttttctttgggaaagcacctctttcccattctcaatcccatcccagctccagccattgacatgtgacccagacgcagctatgtgattggctcagggctgggccaatgaaaatcagccctgggattttgctgggcctattggaaaagagacttgctttgccccaggaagaaagcctggatttgagggggccatctttcctgccatgttggtgcagcctgctgagaagccatgacaaagaagaatagagcttagagatgtaggataccaagtcttgatgacatatttaagcccctggatccaaccttgctggaaaccttacccaacccaagacttttttttttttaacattttgcctaagtccattggagctacctttctgtcacctgcagctagaagaatcctaacaaatagatacacacgtgattttcaagcacccagcaggttgcctggcccacagtaacatgcactaaattgtttatcagacaaaccacaggcaggattgaaacaggtcctcaaagcatgcacatactcccacctaaacttagaaggaccagagaagcctagaatggaagccaccttgaaacagaaagaatgatctagaaacaggaggaatgactgagtcgaattacagtcactatttcaagaaacaataaaggttgtgcaaatgtatccactgaaaagagataaaagaaactcgatccattcacagagacagtgggaattccagacaagtgataagcaaaggaaaggctggttctgccttgtcttgtctccatctttccttttgcctctcatatgcccctgacagggcaatcatcggctgcctcttcggtacaactgagtctacaaagactctgagaggtggggctggccaagctcaagggctccaaggatcacacaaagcttagaaagactcagggatggcctgtagggagtgattagtgacaattgatgatctgtttttagaaactgtttggttctaggcccattacctggtggatgtaagtgatggtgtggaattggcaaatgcaatattattctctcaaagacagtgcctgcctgccagcccatggtgggcagttgtggtagaaaccagtctcatttcagagcaaaaatggagcagctgccaggtgcagtggctcatacctgtaatcccaacactttgggaggccaaggtgagaggattgctgaagcccaggagtttgaaactggcctgggtaacataggaagaccctgtctctacaaaaaaagagtacaaaaattagccgggtgtggcggtggtgcacacttgtagtcccagctactcaaggggctgaggtgggaggatcatttgagcccaggaggtcaaggttacagtgagccatgatcgcgccactgcattccagcctgggcaatagagcgagaccttgtctcaaaaacagtcagggtgtgagggaacacctcaagtgtctaacttaattgtgtgtctcctctctgtaaatggaaggcaaaaggccacttctttctgcaggcaggtagagacaagaaaggtggaaggagcagggtgtacctggaagagacccttaccttttaaggaagacccctctgatcagtcatcacaagatcatgcacatttgctcatttattcactcaacaaacgtttaccaacacctacctgcagtaacaatagtaatagtgaaatatactgaacacctgctgagtgccaggcacggcttgagtgtttcatatagaatttgcccaacaaccctggttgttatgaggctttccaaattacggatcaggacattgaaacctagagaagttatgtaattccccaaagggcacacagctcaaaagtggctgagctgggatttgaacccaggcagtcaggctgcacagcctgcacgcttaagctttcctgtttctctgtaggccaggcctggcatccacagaacaacccacaagtgaattttcacgatgttttgtgcgaggaaggtatgaacgtcaggtttccggtgcacagaggagggagcagtcagtgctgcctgaagggaagtgtaggtggtggtaggggggcggggggtggttaaagaaggcttcacagaggaggtggtggggaagctgggccttgaaggtggaaagagagaggctgcaggcagagaagaggaagaaatgggtgcaaggcagaggaacagcttgggcaagagggtgaccagcgctgaggaaggctggagcttttgggggcatgcagaaaggttagtgtggtggtcgcagagggtgtctgaagaagggatggggaggagatgaaggtggagagttgggttgggatgtcgaaagccaggctaaggagtgtggactatcctgggggcagtgggaactatggaagttttgggaagggggtgatgaagttgagcagactgcatttgagaaagtcggctctggctgctctgcagaggttgaactggatgggaaaggctggaagcagggagcctattctggggctcagaggctcccaggaagggtcagagttcagcagtgacccacaaggtcgcacctctgatctcacctccttctactctcttgcctccggtacactctgctccaaccacattaatacctgaatgttccttgagtgccccaggcacgttcctgtcccagggccttagcactgcttttctctccacccagagcactcttcccccacatgcccacatgcctgtctccctccctttctacttggcaccttctcctttcctgaccagcctggttaagccccagcactcccctccttccctgcagaactttctccacagtgccatccaaaatattatatcaggccgggcacggtggctcacgcctgtaatcccagcactttgggaggccaaggtgggtagatcacttgaggtcaggagtttgagaccagcctggccaacatggtgaaatcccatctctattaaaaatacaaaaaattagctgggcatggtggcgggtgcctgtaatcccagctacctgggaggctgacgcaggggaattgcttgaacctgggaggcagaggttgcagtgagccgagattgagccactgcactccagcctgggcgacagagcaagactctgtctcaaaaaaaaaaaaaaactacataattatttgatcttgtcatttcgtccataaacacttcagtatgtgtatctaaaagataaagattttaaaacatagtcgtaatagcattatcacatctaaaaacacagcattcattcctcaatatcatccaatattcagttagcattcatctttctttccctgattgtcttacagtctcatgatttattttgcatggttgttttggtccaatcagtatctgtgtttatttttttaacagtcttgctccttcttctactggaatatcagtgccatgagagctgggatctttgttttgatctctgctttgtccccagcacccagcacaatgcttgacacatagtaggtgctcaataagttccactgaatgaatatacacaaccaatcctgataataaaagtttgttattgacctgttgggcattatgtgtctgttactgttatttgccataattatcaaatccttacaatctccttatgaggtacgtgctgtgattaggtccattttacagatgaggaaacagctacgtgacccaaggactcacagcttaaaaaaaggctagggcttaagacccattgcacagcctgagggtctgtgaccactggtggaggcaggggcgttgtggcttcccaggagctgcctccacaccttacatccagagtccagccacttttcaccgatcttccctgccaccaccctcttctgggctgtcatctttcttctctttcctggaataatgcaatatcctcctggcagcggcttatcccttctttctctaatgtccattctccactgctaaacatcctccaatgcacaggacagccccacggcaaagaattctccatcgccaaatgtcagtagcactaaggttgagaaactgggctctggttgaaaaaccagacacattcttcatccagagcctggcataagcagctgagagtcagacttctagcaatgtgttagtaataagagtgaaagtcccaaagtttgtaaacaaattcctttttcatcaattagtattctcagttatctctaggataacatcattcattcatttattcaatgcatgtatttcatgcctgctctatggcaggcactgaagacacaacagtggacaaagcacacaaaatccctgccctttgaagcttacatcaaagtgggagagagagaaaggaatcatataattaagtaattatatgtcaggttgaaacaaataaagcagccatggggaatgaacagtgctattttatatgtggtggtcaaggatggccttgctgagatgacatttgagctgagacttgaacaatgtgaggggtgagtctcgtggcatcagcaggaagaccgtaccaggcagaagggacggacagtaagtgcaaaagccctgaggtgggagggtgcctagaacagcaaggaggccactgtggatgcaacagagtgatggagagggagagtggtagggaaggaggctgtaagggtgctgggaaaaggggaaagatgccagataatgggccctgtgagtgggactgaggagttgggctttttctcggagtgaggcaggagccataggagggttttgagcgggggcgtgagttgctgtgtgtggagaccagacgggggatgggaggctggaggcagcagatgggactagaggctcctgcaatggtacaggagggagaggatagggtcaggaaggcagcagtggggtggcaagaagtggccacaacctagacacgtcactcacacttgcatctcactctctcacttgcattctgccaagccgtcctgagtggaagaggaagggatgagccatgctgggtgtgtcagagattgccccttatcctggcaacaatgataacagcagctgccccagatggcgactccctctgttcccagcactgcacatggtgctccacagcttagcacctctgatctccgccatcccatgttgtcttctgtggctgggcttcctggccgtgtgcagaatcacccagggcaacaaatggtgtggggaaaatggggatatccccatgcaatggaatgaagttggttccttatcttacacaccacatgcaaagacctaaaataagactacaactgtcaaactctcagaaaaaatttggggaaaagctttatgatttccccctattgccaaagattcctcgaatataataccaaaacacaggcaacaaaagaaaaaacagacaactcggtcttcaacaaaatacaaaacttctgtgtattgaaggacacaatcaacagggtgcaaagacaacctatggaatggaagaaaatatttgcaaatcgtatatcttattagggattaatatccagaatatataaagaattcttacaactcaataacaacaacaacaacaaaaaccccaatttaaaaataggcaaagtacttgagtagacatttctccaaagaaaatacagtagtccccccttatcacagcaatatcactttccaaggttttagttacctgcagtcagctgtggtccaaaagtattacatactataagatattttgagaaagagagaccactttcacatagcttttattatagtattttgttgtaattattctattttattattagtttttgttgttaatctcttaccgtgcctaatttataaattaaactttatcataggtatgtatgtgtaggaaaaaacatataatatacagggtttggtactatccgaggtttaggcatcctgataagggggtgctagtatatacaaatggccaaaaaacacatgaaaagatgctcagcgtcactaaacatcagggaaatgcaaaccaagactgcaatgagataccacctcatgcccatttggatagctactaaaaaaaaaaacgtaaacaaaaaaatagcaagcattgacaaggatgttgatatagtggctatttgtcccctccaaatctcatgttgaaatgtgatccccaatgttggaagaggggcctgcctagtgggaggtctttgggtcatgggggtggatccctcacggatggcttgatgccctccttacggtaatgagttcttgtgagatctgcttgtttaaaaaggcctggcttctctcttgctccctctctcttcatgtgacacacgtgcttcccctttgccttctgcatgactgtaagcttcttgaggccccatcagaagcagatgccagcactatgcttctggtacagtctgcagaactgtgagccaaaataaaactctcttctttataaattacccagcttcaggtttttctctatagcaatgcaaaatggactaatacagataggaagaaattggaacccttgtacaccattggtgggaatgtaaaatggtaacagtcactatgaaaaacagagcagcagttcttcaaaaaattcaaaatagaattaccatatgattcagcaattccacttctgagtatatacccaaaagaattgttaaaaatctagttggtttctgcttatccatgcccagaagaattgaaagcatgaactctaagagatatctgtaccccatgtgaatagcagcattattcacaatagccaagaggctgaagcaaccaagtgtcttttgatggaggaatggataaacaaaatgtagtgtatacatacaatggaaaattattcagtctttaaaaggaaggaaattctgacacattacaacatggacgaagctgaaggacagcatgataagtgaaataagccagtcacaaaaggacaaatactgtatgattccacttatatgaggtacctagaacagttgagttcaaagggacagaaagtaggaagggggttgccagggcctaggaggtgggcccaggagaatttaatgggcacagagtttcagttttgcaaaatgaaaaagttctggagattggttggacaacaatgtgaatatactttactgaactatacattttaaaacggttaagatggaaaatttcatattatgtgtattttaccagaactaaaaagaaaccacttagggggtgagtttcaactgtggggcctaggcatgagtattttgcaaagcccaggtgatccttatgtgcaggcagcatggagaagcgctactctgtgaggtgtgccccaggtattacccccacctcccagtctcagagaggtgaggcgccttgggggctcatatagccaggaagcagaggaggtgggatttgaatccaggcctgtacccaggtccacagaagtgtgtctcacatggcaacattacatcttatttgttatttatgtcatcagagaaaacatttaaggagcattggcgccctggatattaacatgagaattctagctcccaccccacccactcccgatacgggggctgagagattcctcccatttctggccccacctagtcatgcccactcctgctggagacaccaaaatcaagttgatttcacctcagggagaaggtaggaccttatgcatttagtttatctattaaaataatgcttaatgctaaatctgtctctcccatagtcccatccaggagcctttgggggtaaagtcgtcctagatccagagctaagaacactcctaagtcatagggtgattctggacaaatctctctcctctcagcactgccccagcatgagaagggaatactgggatcttgcttctcactttctgaaggtcactcatacaactcagagatcaaagtcatgggctgggcagtcagggagtcctgggtgggatctgtcccagccttccattcactgtgtgaccctgggccagacacttcccctctctgagcctcagtttccacggctgtaagatgagggtagttatccctcccttatgggggggctgtgaaaatcagatgtgatggggcatttaatgccctttgcactatgccaggcaagcacattgtaagcactcagtgttagctgttgctgccaccactgtggttttcattttatctaagagacagagatgaggctgactgtgccctgccagacctagaatttcttcttttacgacaacctcctagaggttctctctatcgggggtgggctgtctataatacaacaccaggtcattctgaataaatgatatgtcctacagagctttggttggtttccccagaatctcagatcctaagacaaggttctgagtacaagtggcttatatgataagtgatcccagaaaactctggaagaggggagggaacatgagacagggataggaaagaggtcaaacagggtctgttatcaaacaagtaattgctgtgagcaactgaagctgccctggggaccagtgtagaacacacacctctgagttatacccccagccaggggagaagcacgtacacatcgtccccatcagccggcaggtgagtatcccactagttcctgctggggtgttagtgccctgcctttactggactccagtggccagagaaagcctctaaccttacaatgagcaggtatcatttgatgagagcagttttttgaaaaggagcttatttatcttgcaggattgtcaggaggattacatgagaggacagtaaaaaagaaaaaaaacaacaacagcaaaacccaacagttattgagagctttctacataccaggtcctagtctaagtgctttgcatacattaatgcatgtaactcaatccaatgaggcaggcacagtgattggcccaaaattgctgttggctgaaggaaccagggcacagagggctgcaatagttgaccccaaatcacatggttagtgagtagagaagccaaactctgaacttgggcaatccagtgctaaggtcaagtgcttcccatcctgatgacattatcaagtacaggaagtacacaaagtgctgggtatggagttggtgcctaacgcatgcttgttctcttctagttagttaagctttggccaacccattcatttgaccatctctttttcttcctagcatttcacattcacacagcaagtcggtgaaagatcaggggccatgcccaggcctttctggccccgccacccgtacccgctgaggctcagggatctttctgttactccaggatgtttgaccaggatcatctcttagcagctggtctctcaggggatttgaaaggctatgatgggctgtgtgatcctcagcaggtcactggagcatcctgggtctctgggtttctttatcctgtggggatgtgggatttctcaggcacagcttcaactctgatcatgtgctatcatccttcatccttcagacaaccctgtggagtaggttttattatcgccctcacttacagattaggaaatggaagtgatgagaggtgaagcaaattggccaaagtccacagctaggacaaggctgggctgcgattcgaagccaggtctgtgtgaccccacaatcaggattcagaattgctggcatattatctgccaggataaaaacaggcatctggtttgaccaagctggggccagcaagagcctaagtcgatgactcatcacactgaaggggccccatagattctgagttggttcccgcatttcttttgatgataatacacagatccttgtggctcaggtcaaggaagctggaacctcattacactagagacgtgtagctggagcagaggaattccgtgaaaacactaacaatcgttgctgccacttactgaatgcttcccatgagtcaggcgctgggctaggctctttacattaggggcatctcctaacagctcttcatggttgcctctgttataattctcatttcctagataaggaaagtgacactcagagaaggaaaggggcttgcccaaggtcatattcatggtaagcaatggagacaagaaatcaaccgcatctgttggactccagagctgattcttaatcaagtctgtgatgggaaaaatattgaccactgttcctaaagaaaggccactctaagctgggcatgatggctgtcacctttaatcccagtgctttgagaagcttagatgggaggatcacttgaacccaggagttcgagaccagccagcacaatgtagcaaaaccctgtctccacaaaaaaaaatttctaatgtagccaggagtgatggtgtgcacctgtagtcccagctactcaggaggctgaggcaggaggatcacttgagcccaggagtttgaggttacagtgagctctgattgcaccactgcactccagcctgggtgacagagcaagaccctgtctctgaaaaaagttaaaaaattaaaaataaataaataaaggccactcccacttttgaatacaataatacttcatacttataaagtactttccatttacaaattacattcacatctgaaatctcattgaatcatcaaaagagccctgaaagggagctatgactattatcaccatcaggcagatgaattcactggacctgagagctaaaatgatccacccaaggtcccaggatttagaaacataggcttgggaaccagacaaacttgggttcaaaccttggctctgcaattttcattcctttgataaatatttactgagaacctagctgtgtgggctcaggcaagtgacttcgcctctcagagcctccatttcctgttctgtaaaagagtcttcataccacttatcagatccattccctctctcatctgaaaatgccagacacttgctttctcaggttccctcagagctagagcatgagcatgtgacctgtcctggccaatgggattttaaaagaagtctgctagggtgctcctgggaaagggtttcctctcagaaaaaaaaagaaagtgggccaggcgctgtggctcacacctgtaatcccatcactatgggaggccaaggcgggcagatcacttaaggtcagacatttgagaccagcctggccaacatggtgaaactctgtctctactaaaaaccccaaaattacctaggcattgtggtacatgcctgtaatcccagctactcggcaggaggctgaggcaggagaattgcttgaacccaggaggcggaggttgcagtgagctgccgagatcatgccactgcactccagcctgggcgacagagcaagactccatttcaaaaacaaaagaaagaaagtggagcataggagaaaatgtttctcttcacggattaaacatcactgaatgtacgtctgagggctggaactgggcagccatcttgtgatatgaagcatcaagcatgaggaccaagccacttgcaggggttggggagcagaggagcagagagatgaaaagaatctagaatcctggtggcatcattgagccattaactcaacctaaaaccaactgccttggaacttcatattatattcaatgatgcatcttcctccttattgaagctactttgagttttctattctgctgcttgcagcccaaagcatccctaactggcatactacctggttgtatccctgttggaggaatttcaatgagatagcagatatgaagcaccactaatcagtgctgggcacaacaaacataagctaccctggaaattaggaagttatctcagggctttaatcctgagactatcccagggatcacagacactcctgggctggcaaatcagttccctgtctctcctactgagaaaagcctgtcgagttttccgagaaagccaaagccccgtggtagccccagcaccgcaaccctgtcacaccaatggggctgtccccatcttctaaacaagaatcaatcacactgccttttgcctaatgggttttgattttcgctcccctgatggcaaagcctagggcctgtgctttggtttgtctccgagttgccagaacatcccatcaattattaacagtgtcagctcagtctccctggccctgctgctctcagaaggaaagggtttgcagcaactcggcccacccagccctagaaaaaagactcttttccttagcatttataacaacaatccccacctgctatgtgctaggctttgagcaaaattttgacaaatgtgatttaatgaagaccctgtaaggtgagccttttatctccattttacaggtggaaggttgggacttggaaagttggagaaattagctaaaagctatggaagtggggagtggcacagaaccagatccatccttgctcttcagcatatgagatatggccacttttgtatcttacaatcacctagaaatgatcctccatttggtcctgtcactctgtgagttctaagcaatttccacaggctttgcttgttttgacaagcaaggcatccaagctggggggatgggtggggatgggatgggcaaggtgcagatgactcaaaggaggccagaggcacagggacctgggttgcaggtgggcagtgagaaggggtgacaggtccccaaaccctgagacacagtgactgactgcttgcttgcttgcttgattcattcattcgttcattcattcattcgttcattcattcatttattcattccacatgctcctcagtgccaggcaccatcatgggtgctgggaatcaagcagtgaatcaactcatggtactcacattcttgtgggtgtgaaacagagacacacaaagaaggaaatataatttcagatggcgtttaaggcctctgcaggaaaggcattgcatgatgcaacagagagtgaggggagggaaactgtttagaacagcggtcaaggaaggtctgtatgaggaggggacatgtgagcagggacctgctcaaatgaggaagggggagaaggggctggccaagggggaatctggggaagagcattccaggcagcggaaacagcaagtgcaagggtcctgaggtcagataaactctggcctgtttatggaacagcaaggccagtggggctggagccaagtgaaccagaggagatcaaaagagatgagcccagagaggtcatgggggccagattctgcctgggccttgtatgccaggatgaaaagtctgaattttattttgagtgtgatgggaaacttctggaggattttaagcagatgaataatgtgatccaatttacattttgaaaagctcactttggctgctatgtggggaatggattgcaggggcaaaagtggaagccgggagactggggaggaggctgcggcacttgatcattatagaaagaacactcggtttggatttctggctactcctgactgcctgtggtgtgaccttaggcaagttacttaacctctttcagcctcactgtttgcgaaaggtgggataataacagagctgcgttgttacactccatacacagtaggtgtttgatcattggcagccaggatttctattctgagggccagtgagcctgcctccctccccatttcagctctggctacagaaaatcctagatggtccatctgccaggaatgtgagctggcagccccagactgggatcatggagaggtcacaaggctgtccctgctagcggattaacccaagggagaggagaggttctttattcccaaacagcacctcttgcaagccccggtgcttgggtcttgctgccagaccaaaacatggccctgtgcctgcttcttctctgggagggcaaattgtccagttccctgtaccttgttctcatgtcttagggatgggacagggagggagagtcacatttgggcctaaatgggatgtgcagtgggagaacctgtgtcatgcctggaaatagcaaaataagtctgttgatcctaagctgattaagggtgagtgactctgtcttaggaggaggctttttggacacaaaattgggggcgggattatggagagagacagcccacagcctcagaggaggaagccaggcccaggagcctctacatccttgttagggccaacagggaaacgaaaaaaacacgtgggggctccctccaccctcttaccagccaccccttctccatccactctcaggggcctctccttgggtggctagatctggaggaaggaccccacggagtctcccttcagactgggacctgcaggtgggccttcagtgagaactgagccggagaccccacaatgaaaggctgggctggacaggagtcagccctagctagtaagatatggctggatatttaggcttcctcctctcctctttcttttaccacaaatctacttacctgacccctttttttaggccccacactcagttacattctccccatgtttcccaagttggtcttgctggatttcaacatcaacatctctcttttctgggttctccgtgaacctcacagaacctcttttatagccttgcacacactgttttgtcatttgctcccagcacccagcacttcgggcacatgaagacaggccccatctttcccaggcaaccccaaatcccagcctgacgtagagaagttgctgatcaaccagtgccctcctgccctgccttggctcccaccccaagccttcctcagtcccctacagcccctgccattacccagcagcaccaaagactctctggcccactctttgtgttcaaactcattcctgcctcctcctcctcctcctcctttatttttcacattgcctcatttttcgctcctattttgaaatttacatcttgttccaagagctgaaacatctttacaagctgcaccaaaccattctggaaataaactcaccaaataaataagtaaccagggggtgacccctcacccgcaagcatccacaaccaactgcatgtgtcgtgtgggtccacacccacccctcggggtcccttcttacttatgtttaaactatctgacagtatctcaatgtcctgtaagcatgtctgtaagctgcttttttcccttgctggggcagagtgaggttataaatatggagatattaaaatcacagggtgatccaatccagcctaggtctgggacttcacagggaagcaaaccctactccaccccagcaagccactgttgtctctctgtgctctctctcttattcgtcagtgtccatcttcttgctgtggctttttatgggtccctgtgaaacctctccaaccaagtaggggtataacgtcttggataataaaaagatggagtgaccagtgccacatgggaaaagtctgagggggttggtcctcacctctggggactcagtcctagcccctccccattactaatcttcatcgttgggaacaaagccagagtcctccagcagtggtcctcaatatggggatgcaagcagatccccccagaccagcagcccccagatcccagactcaccttggcagccacagaggaattgggcttctccagtaggtcccagagttttttcctcttctctgcgcagcacgtgttatcgaactcctcgccttcccgctcccgtagggtctcggcctcacgcttgagctcctcgttcatctgctctttcttctggtggtagcgggcctggcagcaggactccaggtagatctcgtcgatgccccagtagtcgagctcttggctgaagctgagcgcgcacatctcctccatcatgtgcagtcgcccagtgcggtagaagttgaggatggaggtgaaggcgcccgggtggcggtcaaagaagtactcgttgtcgtcgaggctgtagtcatcgcacacctcgagcagcgagtcgtgcgtgttgcagtcgcggagcttgcccagccgcgtgcggggcaggcggtccagggtacgccagagtacctcgtgcgccagccccccgacgttgaggcggacccgccgagagcacgccttgctgcgcacgatctccatgggctcgggcggcagcgagctggtggagcgggagccatgcttcgtcatgcccgccggcatcgctgatccggccgcccccgccccccctgcccccccaggccgctgtcactcgacggcaaggcccgctgctgcgggggaggggggcagggagcgctgtgggctgctgggggtgcagggggccccgcgggcgcgcgtcacggccgtcttctcacctccatcccgacggctgcgaggcagaaagcgaaagcggacgcgggtcagcaaacggggagctgggcatgctgtccccccgccccccacctctccaccaggctcccagccggccttgaccttcccccgcgcttaagcggctcagtggggtaggacggatggtcgctgtccctcccgccggtgctgaagtccgccgcaccccatggatggagggaggggccgcccctcggggcggggagagggccccaagagatgcccctggagcccgggaggccccaccctgggcttctgcggcccaggcgcgacccagccgcccggggcgctgtccgccccttagagtgctgaaactctcttcattatgggtctcccgatcgagtcccgaacctggccccgccatggggagagagggggagctgcatgaaaactttctttctttatctttttctttctttcttcttcttctttccttcttttttttttttttaacgagttctcttcttttccttccccttctcgagataatcaagattttgggggtgggggaatggcagcgggcttttttccaaatcttaaaagatttgggggaattccgggggttccaggtgcccacctgtccgaggtcacaacagacggggtgtgcacaacagcccctctgtcctggagcgacccctcttcccaaacactggagcatctcctgagattgctccagcgacaaggtgagccgcgaggaggaaaagcccgctctcgcctctccctctgagcccccaaccctaccgcaggaggggcgggcagagtcctcgggatccgcctgctccgtcctcccctcgctccttccccgcccccttctcctccttctcctccccctcctcttccttctccccctcctcctcctcttcctcctcctcctcctcctcctcctactcctcctcctcgttcctctcccgcgatggctttttataactccgggttctgcgcctttccccgggcttggaagggaaggggtgggggaggtgggaggcggggaaatgagctaaattttctggccttttcaaaaggtgccatcctcctaccgcgcactagtgatttcggggggttcccctgagcaccccctgcatgtagggctcacgccttagccccagaatggggattgcgcgtcccctcaggcctcagcccttgcctgcctcccaccccgctcccctccagcctggagctgcggagcccgagcagaccaacaggccgagctgcggcaggcaaaccccctgtccgtgtccccatgcacccccacggaaggccgtacgccccaacactcacccccagggcggccgcctcctggggccagggaccgcgcatcgtcccggccgcccgggcgcccccgcccgtgggcagcggcggtcccggggccgggctgagccgggcctaccccggccgggcaggcaactcgcccgggctgcaggcgccgcggggccggggcgcgctctccgaggcggggggcgccggcgggcgccgggggcgcgggggcaggaccgcggccgcgcggcacctcctccacctcctcctcctcctgctcccgcggcggcggcggcggcggctgcctgggcgagatcaacaagtcggggctgagcttcggctccgcgctcgctgctattctgtcccgcacttcggagcgcccggagccgggcaccaaggcaggacggcgccacctgcgggtcggaagcgagcgcggcttaactcctgcctgcccggcccagcctgccggggaggccgggggcgggctccgggatcgggccaaggagacgcgcgtggccgtgcatccctctccacccaggccacctgcacagctggcctcgcgatcccgccttccttcgtcccgtcaacaacgtgtgttgaacgcctcctgtgcgcgagccgcggtgcagggcacggtgacaggcgtctgagatacagctgtgaatcaaacacaaacatccggccctcgtggagctggttggaaacagatcataaacaaaaaagcgaaaggatatatgaggcggtgacaagcgctgggggaaataatgaaacaggaggaagggtcagagggtgggagggggcagatcggaactgtaaatagcccttgctttcatgagcttccattctagattttagcggggggtcgggggtgggggacggaggcggacaatgaatacatcagtacatatgcaatgtggcaggtggtgataaccgctaagaagaaaaataaagcgaggtatggggaagagagggtgaagagtgagctggtttatatagtctggtgattcattcattcattcattcattcatttattcatgttaagttggacatctggttattgacagcttcctatgtgcaagcagaatgccaggctccgtgaagggaaagtcttccccctggagctccccatccagtgggggaggcaaaacccatcacataatcccagaaatgaaaactggaggaggtacctggagaggcaggcaagggttctctaaggatgccacagatgggccttgtgtttactcatttattctttcaaatattcatttactgcatgataagtaaataggtgtcagcggccgggcacagtggctcatgcctgtaatctcagcactttgggagactgaggcgggaggatggcttgagcccaggagttggagaccagcctgggcaacatagtgagacccatctctgccaaaaaataaaaaattagctgggcatggtgctgcttacctgtggtctcagctactcaggaggctgaggcaggaggatcacttgagcccaggaggtcaaagccactataagctgtgattgca

SEQ ID NO: 295 - DNA, 36358 bp, Homo sapiens
  source 1..36358: mol_type = genomic DNA
tgggacagatcctgatgcacaaacctgtcttttctgcctggcatccctctctgtcacccctctccccctctgacctgtggatctcttccttctccctgtctctcccaggccctggaaagggggagatcccttccttctctcctccctgctctgggcacagggaaccttccaggctgctcagagaccaacacccgccccacccaggcatgggcagtgagaacggcacagttgtctttaaaacagtcaacagccaggcgcggtggctcacacctgtaatcccagtactttgggaggctgaggcgggcggatcatgaggtcaggagatcaagaccatcctggctaacacagtgaaaccctgtctctactaaaaatacaaaaaattagctgagcgtggcggtgggtgcctgtagtcccagctactcgggaggctgaggcaggagaatggcctgaacccaggaggcggagcttgcaaggagttgagattgtgccactgcactctagcctgggtgacagagcgggactccatctcaaaaaaaaattaataaaataaaacagtcaacaaacccacctccgagggtcagaggtttcaaagactcagtgagaagctgctctgtctctggaggcctttggcagctccctgcctgcaaacccacccagctgggcacagcctgcccgccacccattggctctccacaccagcctcagtcattgcaccacattcctctgggggctgcatgtccttacaagcccagcagcacatgcacacacatgtacacacacacaggcacacgcaggcacttgcacacacacccttcactgtccccaagacatctgccttgccttgctccccggtcatgggaatgagtcaccctgaaggttgcaccctcttcaggaagctcctcttgagatccaggatcacaggggaccaaggtgatacaagtgaggtccatctgcagccagacaccaggtgagctctggtcagggctggagtcaccagtgtgtccggggcccaattgtattggataagataaggctaagttgtgggtggcagggggagccaggactcagaccaatttcaggttagggtcaacgcaggctcaggaactgggtgagggagacaagtgcagggctgcttccacagtcagtgtgaagccaagctgtgggagccagggtgccccacccagcagaggcacatggccctcaggggctagacaccaggtcagtgtcccatcaggactgcctctaaatgcatgtggttcagggggttttttgttatcttgaatccagggccctacagagacaagattctgtctccctggagatgacctgtgtcagcccccagggagcacccccactgcacacacccagacctggatacaggggcagccctgtgggcctgggcatgcagacagacccggattcctgtgcaggcacacctatgcatgtccagacaggaacacaggacacagcaagtaacagttacaccctcccagcaccactggagtctcctcaggataattatttattattcatagtcatcagcatcttcattaattattcatatgatccttaattattatccttaacaataagagcagtaaatagcagaaaagtccttgaggtgcctaaggcccagggccgggtgcctccgggcagttagaccagctaatgccctcagggcagtggggggaccacaggccccacctactgccggccctgcccctgcccctctcactggggcccaggggactgcaggagaagatggtcccaagggctgggggaggagctgtgctttcgagttcctctccccttccacggtcagggcctcctgagcagggcctccaaggggagcggcccagcagcgccttgatccctgggtgagccacgtgtccacactgggcagccccactaactgcccgggtccgagccgtgtctgtgcaggggctgggaggtgagggcccccagctggcccggtagggagaggcgtcgtgtggggccttcttggggaagctctggggcccccgggggcagctcctcacacgccatgaactgggaaacctgcaatacacacagagcatgggcaggcgaagaggccatggaggaggaggaaggggagggaaaggggcaggagaacccggggacagaggatggacgggaggacaggagggccaagaggagagtcaggtgggcagagaagctggaggggacaagagccaaggcagcgagagcaggacaggggccaccaaggggaggcaccaaggtgggaagtagagaaaggcattctctgagagcaggagccaaacaagagagctgggagcagggaaaaccctaggcccctgtctcttcccgagggaatgtggccgctgagcccaacccaacctggaacaagcagtctctgtgttgggacagaagctgggacagaaaaagagacaagattccttcccgcaatccagaaagaactcggggacctagaaacagaggcaggctggcggccaggcatctgaaggccagggagagggccggggcaggcgggaggggtttgtgggtactgagcgtctgctggtgagagctctgcgggggcggctgcgaagggagactggcacatttgctgacgtgggccctcgtgtctgcaaacaggagcaggcagcatatgggaggggggagcggatgccaagggaagtggggagggagcagatcccaggccgcctctggcagccagaggagtccccaccatggacgcggaggttgacacagacaccgccatcctgcagaggccaggaacatgcaggtccacccaggagaggacaaggggcaactaaggcccatctctagcagagggggcaaagcaggcccaggaagtcctcccctggaggcttggcctctgcaccctgggaaatgccaagcaccctcaagatgaccctgtgacagccactgccaagggcaaggatgggcaggacggtgagaccagggagtgtcactcacagaagggacccgggaccctgtccctagatactctggtatgcagcctccaccgccacgtctcgggctcagtcagttcttggagaccacccgtggccgtgagacaggcaccaccgttggagctggctcttcaggcgatgctccggggcctggcggtggaggctgtggacactaggggagtgaagctgcgggccacttagcctacaggttccctgcacccagctgtctaggggctttggacgggggactctcctgccctaccctgagcctgcagctcctgaagcagccttcctccaggaggacaggggtgggaggagggcaggaacaaggttcagggaggctgggccacagagcccagcagaaaggcagcaaagcaggtttgggctggaatcggggaacaagcgggtcacggtacatcgaggaagcagggctggagcttacctgagaaagcgagtccaaggtgagggtggggagggggctgacgggcaacagcggggatgtggaagtggggccaggccccggggtggtcacagcactgtaggcgggcgggaccagcgtcatctgcctctgtagcagctgcaggacagtggccatgtctgcactcagccgggtctccagcctggggcaggaagtgggggatgctcagagaagtggggacaccagtgacagcctccaccgggagtggggaaggggaaggggaggggggaggggcagcctgtcaacccaggccctccgcgctagaggtgtggcagcccccagctgggctaggaatggaagaaggggatccagctgctgcacacacagacaggccctctccctctaccagacaacaccgccaggacctggaccagactccagggcgtgcccccccaccccacctgcactccctcacctgttgagctggcgctggagggcatccagcctgctctccacgtcgccccggggccgccgacccgggctggagagggggatgttgaggaggctgggggtgggggcggggcatcgagggagctcctggtactggcggccccgactgtccccccagaagctgaaaatgttggacactcctgagaaggcgcctgcagccagagagcagagctgggtgagcggggtagacgcaccaccgctgccacgcccggtcctccctcgcccgcccgtcgcccgggatacctgacagggggttgcaagtgtcgctgctcttctcgcagtcctccatcaggggctccccacccggcggctctccggggggcctggggctggagaagggcaccaggcggagggggctggagctgcggcctgggccctcatcctcactgctctcagggctggaggggccactggacgggctctccccccacggcccccccggccggccccggctactcggccctgcccccgcccggcccggccccaaggccgacacctcccctggctgctccgtgtctgtgggaaacagagaatgggcctcagagaggggaggagaacagagaggagggggcgagggtggaggaggggacaggagcgagcccgagagaggactgggcaggaagccctggtttgtccccagtcgcttcttctgctatcttgcacccactgtcaagccgaccaagaactcccaggaccccctgactgcccaagcactggcaatggtgcttcaggggttggcggatctctgggactgcggggcctcagccccatcgttggctccctggccctcctttgttctatgttctttcctcctcagtgctcacagagaccccagccctgtgaagtccaaaaagcctaggcttgccctggagggtggaagagggcttcctggaggaggtgacagctgcaggggccctgaaagatgggcagcatctggacagctggggtgtggagtgggcacactggaggaagggatgggaaggtctgaggcctgggtaaagcagacacggcccaccccgccttccagctcccagcctcaccttgtccccgccctcccccttcctcccctcccccgcctcacccttgtccgtgcgcctgcggaaggacaacttgcgcttgcgttgccgactgaagccaccctctaactccgtactgccgggggagcccgggatcatgttggtctggaaccaaaatcagtatcagggccctttcagtgctctcctgccccaccggggtcaggccccaagctccctccttaacacagaaaaagtagggctgggcgccccagctctgggaaaacccttccctgcccccaatgtgattttgccccaggcaaagactgagtttgggacttttgtaggctgctctatgataccatttgacagacagggaaactgagacagagaagcatcacattcaatgtcacacagcaaaggggcagccacacagctggaagcaggaggatggggtccagctcagggcagccaactcacatctcgcaggttgaaggtgatctccaggctggaccagaagtggtcggagaactcagggtacatgtccagcacctccagcaggtcgtcccgatggatcttgtgtaggtcacagtaggtgagggcccgcacatccccgttcgacttgccaggccttgcatacaggttcagaggctccccaaagatgtcattcttccctggaggccatggagaggacagggagctcagccccggggggcggcatccaggcagcaggcaccttctcccggcatccccaccccgggcagagcatgtcccctcagctgggtcgcctgccagccggcccccaacccacacaaccggggaagcaatctgccagcccaccctccctcagctcccagcaggcacgacagtgccagaggggccaggagcccagggtctcccagcaaatgagacccagccagcaggactaccccaaaccccaggtcccaaacaccctcttagccaatcactgcacccttataagcaatgttcttcaaaccaaagatcagaacacagtagtgaatcaaaaccagcatttttttttttttttttttttttttactgaaagaacatacagtagtatagcttagcacagcacagaacagaaatgctagaatgaaccacatgcagtaaggcccagtgttatgtagtgaaactttgattttagttttgtgggggtgtgtatttgtgtttgtacagagctgagaaacaaagtctaaaatgtcctaccatcaactatggtcgaaagagcttgctatatctgccctgaggcacacagggccgagggaaggacaggcaaagggggaggaagtcctcagtgtccagacacaccaacccacccactgtgcacaggcagggtagaaaggaagtggggggagggggcaggactccctttgctttggatgtgtcaaggggccaggcatgaggctgcagggaaccacatggcccttagtgaaaccaaatgccgagcttccaggctagcatttcttcctctactgcccaggctagaggatctagatttgatcctactttaaggaagcaaaaagtgtctgtttgtggcggatcctgaagggaaggagaatgtgggaaccccagagttcagcagcctcaccccacgtggggctcctctccatggccccgcttggagggcctgagtttaggtgaattaaaggagcccagtgaccctgcaggcagtcccaggtccacagccccagtgactgcatattcagaaggctcgcacctcttgaggctgcagagggcatttccagtccagtgcccgccccccaccccatacccaggatggccacgacgacgtcgccccgcaggatctcgatggagccccgggagatgaagtacagggcggtgagcaggtccccagcatgcaccagtgtgtcccctggcggtgcatgtgtggtcttgaacttcatggccagggcccgaaggcagcccttggtggcccctcggaagggtttgcagtgctgcagcagtgagcggttcaggtgcaggcagatgtcagcctgcaggcactcagggaagcccttcagcacctgggggcagggtgggggcagctcagcacaccctcccttgggaccccccaacccacactctactccaccatcccacccctccatgtcagagaaatctcaacctccaggcctgggagatctcggaagcatcagggggcccagtgtcttgggaaggacctgggaccccactccagcttcaccatgcctggccgagcacccttgggctctagacctccatgttcttatttgtaaggcatagagaccattcccgccctgggctgtcacaaggatttaaccccatcgcctatgtgacatatacctcccaccccaaaaggggagctctccagggaaggggttccaagggcttccatttcctcatgggcaaaaaggggcaacgtgcctccagggtccttactactgactgtgaccgcctgagacttgtttgctgtgccaagaggttcccctctgccaccccactcttcccagcctgccacccactggccacgctctggtggcctcaccgcgttcatgtcgatgccgttggtgtaggaccaggcgtgctggaagtactcctcgaggcgctggcgcaggggattggggatctggtggaagcggatgaactcccgcacccgcagcatctgtgtgtggtagcgggctgtgcccgagtacagccgctggatgatggccgacacgttgccgaagatgctagcatacatgagggctgggggcgtgggcacgtggggccgtcagcctctgcagggaccccacccacccacagggaccctgctcaggccccgcaccaggtcagtgtctcagtctcagcgtcgacatgcccacgagacgcccttgtacatctgcgctccagcacaccccacccttcagtagtccccgccctggtgacccagcccccaaaccatgtcacgatggtggcccctggagtctctaagttccagggcctcactctggcccggctagcagcctcagtttcctccaacttgggttcctccaccgtgggctctccccgccgcccgcccctgggcacactcacagccaatgagcatgacgcagatggagaagatcttctctgagttggtgttgggagagacgttgccgaagcccacactggtgaggctgctgaaggtgaagtagagcgccgtcacatacttgtccttgatggaggggccgcccaggccgctgctgttgtagggtttgcctatctggtcgcccaggttgtgcagccagccgatgcgtgagtccatgtgtggctgctccatgttgccgatggcgtaccagatgcaggctagccagtgcgcgatgagcgcaaaggtgcacatgagcaagaacagcacggccgcgccgtactctgagtagcgatccagcttccgcgccacgcgcaccagccgcagcagccgcgcagtcttcagcagcccgatcagctgggggacagggaaggggcacattccgttgatggggcaaggggggcaagggaggaggggaggtgctgcggccctcagagcgagcatcagaggtcagatccccaaagacttcctagaccctcctcctaagaggtgaagcccacactgggcccagcacaggtgtctcattaatcttagtgctagctttgggacagaggcagcccccatagtgtggatgaggaaacaggggcactgacaggtgcagtgatcaccctagggtgcctgcccactcccaccagcttctagggcactttggtgacgctacaaaataatggccccttgggatggacgaattagaaaaaaaggtgtcctgtgtggccctctgcaacctgcgaggagcttgtgtggagagaaggagcataggtttgctggggtacccaccttgcctctgcagctgccttgccaccatgtctctctcccactgtctttctctctttctctctctctctctttttctctgtcctcctcgccaccccctccaccccactacctcccaccacattcctggcctctcctctccctacaccacctgcctccttgctgaccccacctcctcagagccagagccgaagatgagcaggtcgaaggggatggcggccaccatgtcgatgaggaaccagcccttgaagtagtggacggcgatgcggccggggtggctgaccacctcctcgttggcattgacgtaggtggtgcggaagttgatgaggatgtccacaatgaacatgatgtccacgatgaggtccaccacagccagcggctggcaggcgtagccacactcggtagcaggcgggccttcttccgtctccttcagcaggaaggcagccgagtagggtgtgaagacagccgtgtagatgaccagcagcaggatgagccagtcccacacggccttgaaggggctgtaatgcaggatggtccagcggtggatgcgcggtgcctgcagcttgtactcaggcagcacgtcggcgcccagggacaggacctgcacccggggaaggcggaggtgtgggtgaggcaggccatgggacctcgggggcaggagcgatgacatctctgccggggccaagcagaatgaggaggaggccaaaaaaagcttccatcagaatgcccacccctcagccaagcgaccacagcaaatggccacccccaggtttgggcatcatggttcccaaaatgccacacagcacaggactggctccaaacagttccaacatttcccggcagacgtggattcaggccactcggcaggaacacccagtgctgctccccgccggcaatgcagatgcagacctgccactgtgactgccctgagacgctggcccacacacccaaccacacacgccatagtctcagaccggaaagggttccaaggacaacagctcccaacctgggcagtggccccaggagccatagccccaatccactgactggtagtcactgcagttcttaccagcccctcttcatgccacaggcccgaggacaccaggcaaccaggatggagaaagaccaagacactcccaccctccactcgcacacctcgctccctcagccccctctccacacaggtccgggacagcccacagtcctcatcctcccaccctcttacaaagggacaaagaagacatagcccagctgggaggagatggcacccaacttatacagagggacgtgcacacagggactgctcagcagtgacacacacagcccctgtaccagctcacactcacactctgcctcctccacagtcatcagacagaggcaggctggccatccggacccggtgacagcaggcacgtccctcttgctcccaaggcaaactaagaagagctccggccagcttctccacactgtcccagaagcttctgggtctccctagaatcctctctcaggcatgcagctcaacccaaaagccccctccccaagctctccctgccatccctgggcagccagctgaacccaaggccttgcccagcccccatgaattccagaggtgctggccctgctcccagaagcactgactcccaggcccccacaccctcaggcttttgggttggggaggccatagttgatgagtcccaaagactccccttcatactcaagctgggcttgcccaagacaccttcacagatggcgctgctgggagaacatctccttagaggaaataactagaagtcaagacgggtcatagtcaaagatttgaccaccctggggtggacacagggcctccagcggtaccagatgggctgcgggagcagctgaggcctagggcagggagggaacacatggacaggctcacaggctccatttctgctctgtctgctgtctaagtgcccagctccttaaggcagagagcaaatgcccatgggtgggtggcccttcagtgatcaagtggggactgaaaaaaaaaaaagaaaacactggccaggcccctgctgataagggggcagaagaaggtagctgcccctggacagggctcttctctgtgcctgagaggtcaagcctctgggcggaggtgtcaggaccacccctaacagcagtgaccctacccctgagtctgcacacagcatgagcaacactgccccagggtacaaactcacacgtgcatggggcacacctgacaggggccagtcccagctctgcagccaccagctcacctatggccttgggccaggtctgtccccccagcctgttgtcctatagaatactgaagctggcttgcttaagccaaaccctgactcctcagctgtgggtgggaagacctacctgtacctgtcccccagctggaaagagtgtatgagccaaggcagaatgtgcagatgtggggtggtgggggcagggatgggattcccagacttagccctgagccacctcccactcctcctccactgtcggcccaagcctgccccaggctgacagaagagcggctggatggctcccaggaggtcacagagtagtgcatggcccagccaccacacctcggctgcccatgaagagatgagccaggtgcctcagcccagcgcgccctcaccacccacacagtggcttccgcacattccagcctcctcgaccccccaaaacagcacaagcctcctttgcccacagggtccaaccccagcacacagagcaaaggagccccggcgcctccatgccaggcccagctgtcgcctgccggcttctcctggtcctgcccatgggctcctttgtcccactccgcctccccaccatctctctgggcacccatctcattcctgtcatctccccactttgcattttgagctccaggactgtgggccatggcaggcacaggagcggggaagtcccagcaacggaaactctgtaagcccagcctgggagggaatgagaacaggagccaggcgcgggtgagcagggccaggccccacggctcccaaagcttcctacttcccagcagccctctccccagcctggagtcagagcccttgggccagccacctgcctcagtgtgccggccccagaaagaagaggaaggaccgggtgtcacctacctcctgggccacgaggctggagatgcgcacggcccgcctcacccggcctttctgggccctgggccgcagagcccctgtcctgctcgccttcccggctggggccgccatggaggacttggctccctgcagcctgcctgccctggggcctgagggcccggccactgcctcacctgcaccccagcagcagtcccagcccaggctgcacccccgaggctggccgactggcaaccagagcagcccctggcatgaagccagggtggttgtggctgggccccagggctggggtcaccctggcagtaagcgtgggcagcagcctgcctggctcgagctgcccatggccccgtggcgtgggccctgctgccagggtgccgtgctctgcccgcccgccagcccagcagcggccgcactcggaacctcagctcctccagccggcccctccttctaccaggtccccacccccaccccgccacactaggctcccccgccccgccggtgcccagccagcggccccctcccccgcagcccgcccaggctcctgcagcggcgctcccgcagcctgagcccctccccctccgccagcagccgggcctgtcaccgcagattaatggtctccctgacacccccgcccagccggtccagtgctgagccagccagagtcagacagagacacccagagatggagagactgctagtgactggcaggaacacacacgcctgccgacacatacaggcgcacatgcacagacccaccgcaactcacgggcacatgcagcgggcacaggagcagggcagatgccaggggctcaggtgggaaccaagagagaagcaagggaggaggaagagaggggtaggtggccagataagggcctggggtgagggggaatgctctggagtcaaggccagtgggctggagacctggcagggacccagaaagccaggcggtgggagcagggccaggagcccgccgaggtagcagggcagctcccttacatgagccaacccaggcagctgctgtggaaggggcaggagggaacagcttgggacaggagtcctccacattatcccaggcttctcactcactgcagagatctgcactcctgacccacccacccccagcccccaaaggctaggataaggtgtcgggtggatgaagccatggaggggtcgcaggtcctcttgctgccaggaggaccccaaacccaggaggggacagaagaccaggctggctaatgcccccaaggctgaggggtcttctctggcccaggattcagggacctgacccttccatatctttgtacccaccacctccctatgagaagaaaacttgcttctcccatgctttagggacatagttgggcccctcgaggccatcctggccatccccacaggactgaggcccaccctctgcctggcacatcaccttggcctggaagaattaggaccctcctgtccttgacctctgtgaccccttctcatttgaagcctcccagttggcttggcccctagtacttccttcacacaccctgcagccagacctttcatgtccctcaggccgccttccccccttgctactggccctgtcatgtccccagcctcaactgccctgtcctcaccctgtgccccgaaggcacgcaccccatccacccgacctccgctctgccattcccagccctttaccagacctctccagtcccctctccaggacttctcagactgtcccctctccccccatcgcagctctggaatagattgccaaccccaaccctcaggtctgcctccctccaagaggccctcactggctagccccctccacccggctctggatcacagcccactcccaccccctctccaagctcctccaaggtgagaggagagcccggccgctgggcgcctacctgggtgaccttctcagtgacattgtgggttcgctcctttatcttaggtgctatgatctcacggtcactggtgggcgaagccaagaaggggtcgcccttgaggtccacaaagttgagggtgatttggggaatcttgctaatggtgcggtagcgcacgaggtcggagtccgaggtggagttgagcaagccgctgcgcagtgggtgcatggcccctaggtggagaggcagcgtggtcaggccagcagcccagggccccaggccaggcaggccacccatagatcgagagtggagaccaggccctgcacagtcaggagtccatggggtcagctcaagagaccaggggagtcacaagaaacaagagaggtcagacccctgtcccactctaaggaagcagccaggagacagccctgagaccaggaagaggaagaggaaacggtctgctccaggacgctggcaggcagggggccaggtggtgttcggaggctgggcacgtctcctgcccagggcatccctgctccaggccgtcccgggacagccagctccaggggcccaccagggctctgggagtggaagaatgtaatgggatgaatggacatttaatagcgcaacaagccacttaatggaattaaataagtgcttaatgggatttccatctcccaggcacccaggacgtagtgaaaaggtcagaagccgagggcccagaatgcagcaagcctggcagcagaagaagcgtgggctggggcggaacgggtcccgcggcgccctcaccggtgctggcgtggcgcggtggcgggggcagcaccccggcgcgcatggcctcgatgtcgtcggccgacgaggcgcggcgcacgctggcgcagctttctcgggagcgcgtccgggccaggctgcagctggagcccgaggcgtcggggttgaggctgtgcgcccggggcgatgggagctggccgggcgcgctgcggggcggagagccgggacccaccagcgcacgccgctcctccgcgggcccgagccctgccacgtggttgtccatggctgtcacttcgtccagggccagcgactcgctgctgggtgccgcgggcgtcaggtccacgtccaccaccacggcccccggggcgcccgcgccgcccgcgccgcccgaccgcaccgacgactcccgggccgtcagcgccagcagcgcgggcagcttcaggcggaaggtcttggcgcggcctgcgggagaggagaggcacgtggtcgtggggatcgcgagcagccccggagcgggcaaggcctgggaaatggacccccagccgctgggtaagggaaggaggggaacgggcaaccccccatccccacttccattcacaatattttgacctcgagtctcaaaaatcattctagaatccagtcatcataaaccgccatatctgaagtgacacttcagggcggattccataaatcatccctgtctctcacaccggccgctgggtgccagcgtccccattttagacatgaggaagtgtggacacaaaggcgtcatgtcactctctggaggtcacacagccagtgcgtggggcctgcgcctaagtgggcgacacaatgccaggggccctgccgtcaggggtggcatccgatgagcaggtagggccagttttactgacactgtcattttagagtgtaagaaaccaagaggtgagcacttttgtcatgatgctgagggaaagattaaaattaagccaaagagggcatcctgacagaggaaggggctccgagcctttgttgtcaaggggatggtccagcccaggtgggcattccctcaaagcctctcctcagctagcccagacccccaggaaacttggccagtccatgaacaaggagcagatgaaagaaactacacacagctgagtccataggacacagcttcctactgaggggaggagctgctcccaggtggtcatgttccccaccctgggctgctcaagccaggctggagagaggaccgctcccaggggatgctgggatgggaagcccaacagatgaagctagggaaacggtgctagcccacgccaaggacctgtgattctgggccctgtcattccacccctatgtgtccatcctgggccaggggaaccaagccacatcctcagggtacagggttcacttcccacctccaaaggggggaccccccacccaaccattacatcctcccttcctgcagagcgttgaccttggacagctcacagccccaaagaaatgagaccacgaacccctgagcctgccctaaagcaagtacacttacctggggccagccagctggtgggggggccccggtggttggtgtcatgagccggggaccccaccatgtccttctccatcaccacctcgaaattgaggatgaacatgatgacagccccatcctcgttcttcacgggcaccacatccaccagacataggaagcagctccctgcagagtgggaggacatagcccccttggcacccactcagtgggcagagcagaaagccacgcaggatggaccctggaacccaagtgggcccgtccacttctgcctccccgtatggcccttcctctccgggatctcccgtcctgatcccccacccggccatgtgcctgccgcccttatggctcccctcaatctgtctaccccagcttgttgctgccaggctcccctacccctctctctgcctatatgatttatctagctctttcccggctgcactttttctcacgctggctatgatcctttcttctgccatctttgatctcatttcctccctatctcatttcctcatatcctcccagcacctctgcctttccctcaagcgaggcgctgtagcacagtgcttaagcccacagactttaggcctacgatctctgggttcatagcccggatctgctgcttaatcacttatgcttttttcctaaattatttaacatccttgtgcctcattttttccatctataaaatgggaagaataataattttttctttttaaaattttttaactttttaattgacacaataattgtacatatttatggggtacacagtgatgttgtgatacacataatgtatataattcttttctcatgagttataaagattaaccaagtcagcacatgctgagcgcttaggcaatgcctggcgtatgccgcacactacagacggttagctgttactatctgtctctctgttctctctagattagcaccagccgttgtgtcagcacacaagataaggacagacgttgagagcaagaatttcaaaaactttacagcaatttggcatcaccacaaaatccacgcatgtgctcttgtatttcacagatgtaccagcctataacatattagcattaaaaaacactgatccttcaccaaagagtctaagaagcactgcttctagatctttcatcttcacctcgcctcgcgttcccctcgatccttgactttttcttttccagtctctctctgtccaccaaaggccctgtaccagatgaggtcagtcccctaagccaagcacccctggtctccctcagctccctgttgagcacatgggccccctgctgccccaccgccccccgccccccaacccgtgctgatttctgaaggagccccttttaggccaagcactcagttccacctaaggcccagctcagaacctcctgcccacaggaagtccttaatgaaaccagaaggcagttaacagcccgctccagctcctctatggccccccagggacccaccaggcaggctcctcatctcccactctccctagggagcctcttccttcctctcagctccccctctgctcagctgtcttctctgcctcccagtgtctcccgtccccacgttagtgcctagcacctagagtcatacgccctggggccagcactggctggtggtgtcagtgacaggccatgctgacagggaggctgcaggcatgggggagaggcaagggtgacaaaccatgcagtcccactccatcttagcaacccagcctcactttttttttttttttttttctgagacagggtttcactctgtcacccagggtggagtgcagcggcatgatcttggctcactgcaacctctgcctcccaggtccaagtgattctcctgcctcagcctcccaagtagctgggactacagctgcatgctaccacacccagctaacttttgtatattttgatagagacagggttttcactgtgttggccaggctggtctcaaactcctggcctcaagtgatctgcctgcctcggcctcccaaagtgcaaggattacaggtgtgagccaccgcacccagcctctcctcacctttctacctcctagagcctccctggctcacccctactcctgatctcaaacccacagcaggggcgacagtggtggtgctgtgagtcaaggtagaagccggcaacagacaccggcaacctggaggcgacgccacccctgggacttggagctggtgcttgaagcctgacagtgaggtcaaggggctgcgtgctggggaggcagggagcaggccaggtgggaagggcctgatgcatggcagatgctggccaggctcggggattctaacccgctggggattcatctaggggaacgaggtcttctgaaaccagcttaaacaggatggcactaggtgaaggggctggccaggaactctccgccccaccccacagctcttccactcaccacatcccagaccctcacagccccgcccgagggccctgagctctggggctctgtctgggtctccctgcagcagccactcttgtcccctgacctctggcctctgacacacagcagtggtgttggaagctgcagggggctgggcccagctggagaccatttggcacccagacagcctgcctggagtttatgccctaatatggtgatggccggcagcggcctgaacagggatgcgcctcaccaggactgaggagaggctggagaccaggaagccttagcccaagagaccccagcacccaccccagggaccacagccagccaggccctcgaacctaagtcctccaccagggagcttgcctcagagaagtctagagtctggagccaagatggactcaaacttcagaatgggctggagactgtccccaacacagggccccagaaattccaaccttgagacctcagcagcccgtcccctcttcagctcaagctgctcagcaagacagcccagaatggcattctgaagcccacccagtccaggaccccacatctcaaaatcccctgccagggtcgcagaaactctaggtatacgccacctcacagcacaagcctgtaactcacacttacacacacacacgagagacagagagagagagagagagagagagaggagtgactgctggccctcttcctttgtcgagattcaagaaatttttcctttcaaaataaccctgtcaaaggcctggttattcaaaaaatgtgaactggagccctgcctgatggcaggggctggggcgggggagatctagcgatcatcaaggggatgtggaaggaaggaaagtaggggccccagataggcctgggctctcagaggcactgcctgcaaccaccctgccgcgtcggctggggcttcggtgaactgccacatcacctgctcccagctcttcagccaggcctcccagccagactccatcccaccactggctgggttatggggggatgggagtcccttcacttgccccagtgccacctactccagacccccaggccctcgctctgctcccttctcccaccgactcgccctggctcctgccagtggccccagctccccagggcagagacgaaggacccagctgctgcaggctgcagttccgctgagagccactccgtggcaggcacagcccacactcccgaggcagccagcactgggcgcactcagggggcagccaggacagacaaggagggcggagggggtgcaacaggggagagggttcccagtctcaaagggagggggcatgggctgtggagtcaggtggcctctgcacattgcattagaatgactttgggccggtcacttaccggcccagagccccggggcgctcatctgcaacacagggtgatcctgcccaccccctagggccgtaggggtgaaatggcctaagatatgtgaagctcagagcctggcttgaggtcaccataagcttgagacagaagagaggcagacaagggtggagggagcttagcaatgagaggccccagggccagcctggctcatgtggctaatgccagaacactctgccctggccccattcccaccccagccccagccccgaccccactcccaccccagcctcagccccagcgctggctgaagacaccttactttgggtgagaaggttctccctgcctggcccagttctgcttcctgggccctctgaaaggggaggcacccatggacgcaaccatccctgcacaggctccatggctccttagaacccccgtgcctttgggcccaatggcctgggtgaggcaggcaggctggccacctagcaggcctccagaggccatgcagctcagagcagagcgggagagccaggcctggacacattcccagagtggcaggtacagcgccatcctgctaccacagaaggtgtccatcacttctcagaacacaacgccggcttgctttcatttggtgccaatccacacccagcagtctacctggggtggggggcactgttcctgcccagcatcccaacccatccgaggtcaggggctccacccaattccccacctctgggcaccgctagcctaggccaggccccaggcaggagccacatttggctgtggcaggggcaggccttatctcccatgtcagcaccaggtggggaggaagaggctgcagatggccctgagtgaccttaggcaccttctggggtcagagtctccgtgcgctcctccgtaaatgaggtgctatcacagcttcttcccaggcagctcctcccagtcctctgcaaatcactaagcacatccgtgcctgcgaagtgttgagccaccgtgaccaacaagacacgcctggcacctgcccccagtgaaccacccatccaacaggaccccagtttgatgcatgggcaagagggaaggagagggaacaagccagacaggtggaggagccccagggagccgagccactctaccccagccatggtggctcctgcgttccctctattttctgtggctatgggcaggtcacccacctccctgggcttcaggctccctgcgggtactgtggggacaagtgattcctgcactgggtgccagatgagatgacagatggctttgtggaagcatccagaattctaacaaggcggggtgctgggtccctgcagggaaggtgacctcagggaggcagccatcctcgccctagtcgcctccctgcctcgctcggagcaggaggagctgtgcccaggacaggcccaaagtcacgctgagggcaggaggctggggctccagtcggcctgtccgcccccaggcagagaggctgtctccggagcagcagcccagggctgtgcagtgtcaggttatatttagcctggtggcggcgacaggaagatgcagcaggagccgctcctggcagggggccaccgtgtcactaacacagctctcatgggcagccaggggcctaggaaaggccagggacattgcaggcccaggggacagagttagggagcccaagaggccaaccagtgaatgagagagaaggagggagagagacagagacagggagagagtgtgtgtgtgcgcgcgtgtgtgtgtgtgtgctgaatgagagagagaccagtcctaagctcctgcctccaggatctgggaaatgcagcaggttgaggggccccaagctcagaccctgaccccacagaagcagcatctccagacagactcctccaccaccccttccagcctgagacccagccagcaatccatgggatcatttatagggtcttgggggccgctgtagtcatctagacccacccaaatccactgcatgtggcatgcctgagccatctctgccccggaccacagcaatgcctcagaagatctctgtcctctagcttctctaaagctctggggcccggctctgcctctcgggtggtgcacgaactggaagtcccacccgctgccctcctgctgagaagcctgggaaggtgaaacaagggcacgctgatgccaggaagcagctctccacagctccctgcacaggcgcgtgagtcccgggcagttgcgccccagcttcagcccttccctcctgctccccatggcccccacccctcttccctccaactcctccccagccttctaggaccccctctagaaaggtttccttgactgctccgtctgacccacatggacgctgctcttggagaacttgtccaaacaatgcccatcgtctagaaggccactgtacactggccgggcttccccgtccatccgagtcagagccctgaggccagggcaggactggcagttgcagaagaactgagggtggactcaggggtggtgatctgcagtcataacaggtggggacaggccatgtccccaccctctcagctcccttccagatccaggggcacagcccaccctttcacagcagaatttgcccatttcaagcccgtggtgccctccagcccaagtctggacagcagatggagcaaccatgggaattaaggtgccttttgatgaagcaaaattcaacctggtcatcagttttcatggaacacagaggctgagcacccaggaacccaagggaaggcggcaaaagcaggaactgcaccaggtgtgagacttctgagcctcagtccccttcagccccccttcactgtgaccccacacacagcttgccacagggcagtgaaggtgcacacagctgccactgtccaccaggggacactctggggtctcctctagtgagtggcctgtaggcttctaggtctgtgctctgtcttggctcctagcataccccagacagcctggtaagctttgataaagccctgtcccaattccagctctgccatgagtcacagcttaaaccaagagttataattcctcattgatttgccccctcccccccccccacacacacacacacacaggacactgtgaagcaccaacaaacaaatacgagtgctaatgaaaagcccccagaaagtcaggtggaacattcgagcatcaaaacatgtgacggtgatccaaacataaacagcgaaaactggcattatttgcagatgacggggtcacttgcctagagacccccaagaaatcaacagataaacaattagaactaattagatcagagagttcagcaaggttgcaagatacaagatcagcccgcaaaaatataaagcatttttctacacaagcaattaggaaacatagtcaaaaacaatacgtcttttacaatagcaacaaaaactcttaagtgtccaggaattgaccaagaaggcacaagaaccctgttggagtcggggcaaaagggaacaaaaccttaaactagcaagaaatacagaactcatctggtaaatggagagacaatccaggctcttgagtgggacaaatataaagatgtcagttctccccaaattaatctatagaaccaaactaattccaatcaagaatctagtgggtgttttctttccaagaattcaataaactttctctaaagtttatgaagaaaaagggaggccaggcgcggtggctcatgtctgtaatccagcactttgggaggccaaggcgggcggatcacctgaggtcaggagttcgagaccatcctggccaacatggagaaaccccgtctctactaaaaatacaaaaattagccggatgtggtggtgcacacctgtaatcccagctactcgggaggctgagacaggagaatcgcttgaacccaagaggcagaggctgcagtgagccgagatcatgccactgcactccagcctgggcaacagagtaagactccatctgaaaaaattaattaattaataaataaagtttatgaagaacaagggagatccacaaatagctatgtcagcctttaaaaaacagaatgaagagagaggatttgcctcagcagacgctaagacatacggaaggctataggtttttgttaagctatatcaatgcaagagccagtaaataaatatttggaacagaacagagagcacagggacagactcatggctatgtgggagattaacctgataaaggctgccccacaattcagcggaaaagaacagactgtttacaagatgcgttgggaaagttggcacattacatggaaaaaataaaactcgatccctacttgacaccacatacggggtagtctcaggatagattatagacctaactgagaacagcaaaacaattaagagaacagaagaaaatggagaccctctgcagcctgagacacttcaaaagtacaaacaaagctaaaaatcaatgaatttgtttgcatcaaaattaagtatctttgttggataaattgaagagagactgaatgggagaagatatttgcaatatctgtttccagttcaacaaggaattaaaatctggaatacactgaatgtttaacagtatgcattggtatctctagagtacacaagcaactcctgcaaatcaacaaggacaaaagacggcgacgtcaaaattaaaatgagcaaaggacatgagcaggcaattcacgggaaagtaagcccaagaggctaccaggcctaagagatgctcagactcaacagaaatcaaaggaatgcaaattaaagcaacaagaaatcactgtcacctattagattggcaaaatttagaaaggtagataatgtcgagagtggccaagatatgcgggtatgggaatctcgagctctgagaaggagggtgatgacaggcatggcagtacttagttaagtgtccacatgtcccgcgatccagcaattccactcccgggcgtgtatcccacagacatcctcacccaagtccagaagggaccatgtccaaggatattcactacagcctcatttacagtggctgggagttggagacattgtggggtccctccccgggagagtgggtgggtgaagcgtggcggccgcatgccactgaatacgcacctacagactagatgtcgaacagcaacccagctggacttaaagcacattcccaagtaagaaaagcgaacaccaaaatacaacatatagcacaatatcatttacataaattaaatctatatgcatatatccagacaaaatacacatttgcaagaacatatgcaagcaacacattcacagtaagtacatttgaacggttgcctatggggagggtaatgagactggagagtgagataaaagggaaaaggaaaaaaatgaaagagaaaggaaaaagcaataacacaaatgctgtggtttcaattatttgggggagaggcaggacccggggccagcagcagcctgcagggagggaaggggagaggcaggcagcatgcaggatggggcggggtgcaccataggagcaggggtgctgaggccccggatcaggctcatttcccacgattgcaacagcacgggctaggagctgcagccacttaggtgacgccctgcttcatggcgaggagaatgagctctggcaccgcacgctgctttgtgggtgtctgtcatctcattccaggaacaccctcacaccccaaagtgcatcagggacaggcgctatgatcccacttagcaaacgaggaatggaggtttgcagaccccagctaaaatccaagtttcctgaggccctgagcccatcatgccccagaagggctctctgggggcaagagagctggtgcagtggcattccacgctgggcagggaggggacagctaggctcgggttcccactcaggccacccgccagctgggtaaacttgggcaagtgcctcagcctttctaagcaagagcttccctcccataaagtgacggagaggaatcctgcctttcacagggccatgaggaccacctgcggtaaagcatggttccccagtttgcaaactacaaagtgcagtcacaacaatagaagtgccttgtgctgctggtcaggtggcatcacccccacctcagctgtgctctctgtggcagctctaagactctgtccccccaccccatcctcctcggtccacctctgagggtgaagctgggagcccccagatgctcctgtgccccacaatgtccacgcaaagcaaggctagaggactcccagacacagcaagtctgtaaccaagctggaaactcctgccaagtcacctgactcccagggaaggctcctgcaacgcagcacactgcccaccccattcattcattcattcagcaaacagtgccgagctctcgctgtgcactgagcacgcagatacaacagagaacaaagcagatgggctgctctccacccacctggagctcaaggcctggtggcggggagagggacagggaacctcctccagtactgcaggaggcggaggaccaaggctgcctggctcccaaggtgtttctcatcctggataagcacccaaaaaggagaggggtttatctgaggccaaccacaggccacagcatagagatctttatgggcaagactaaggacatggaggggactttaggggagcaccccacattcatcacctgtcccagcacccctccctcttctactgaccctgactcccatggccctcctgcccacgtcgggagggaagttctgttaaactccctcacactaaagggctaaatactttctgtctctatactgggagggggcaatgagagagaacgtgtttttaaggaaaaaggagcactctaaacgcagaagttctctaagggaggagtttcaggaacgcttcagggaaataccaacatgtgaagggctttcttggaacctccaaaatcaccccacccaggaagccacctctggggagaaaagaggcccagtctcccccctcacacacccccaagctggcccttctgctgccccatggcccccctccccagagcccaaggccaccatcaaactctgctcccatctcagacagctcttcgcaaatatttacatagctcctctccgggggctgcagaagacgcaacacggagaagccgctctcccgacgctctccagaccccagggtgggtcaaggagtagatagcacccttcagttgcgtcatgcctgcctcacccctggagcaggactgggataggaagactgcagccccggcagaccaggacagacagccgcagctcaggaatgacccccgtggagcccctccaacaggcctctgatccagctagagaagggaaaggtggagggaaggtgctgcagggcaagaggcaactggctcggaagcagggcccccatggacccccgcccgcacctggcagccctgcagattctcccactcagccctgtctccaggctgcaccaggccttgaccagaaggataggaacaccgctgtccccatgatgaagggcgctcccctgatagcttcagtgccacaggaaaagttctcctgtgtctaagccccatcctctgggatcgctctggtctgcctcctatctcaagacaagaaaacccacttatacaccaatccctgtcccacctgccttcccagcctcaaggctccccttcaaggaaaagcttctttcatcctcagctcagacccagggggctgaaaagaagcagaaagtgggtgtctgagctggggaggggtcagccatgagggagaaggtgaggcgtggtggtgacaagagcagggcgtctgatttaaaggaatgggcacaggaagaaatgaagaaggcaaggaagaagacaggacagacggccttgggggacggagaagggcaggaggcccagaggagtggggctgatcacaggaggtactaaggatttcaaggcagtctgaggtctgaggcctgcaggagcactggggaggctgggttccaaggccggggacagaccgaagcccactgggcgtggggccacctctgaggccctgggcacagtgcactggggagcaggcctggacagcaggtccccaccccctcccaacagccgcagcatcagctgttgcagtggggggccctctgaccctgttaccatggcaactggcctgcagctggagtggagaagctaatagactcctctccagagacaccaccgtccccacccacgcacaagctcccggggacacagggacatggagccaggccaggccagtcagaggtatgagcagccagacagagccttccagatagaggctccgaggggtgggggacaatgggagagagggagagaggcaaggagcaaggttccggggtgctgaggcgagggaagaagacaggaggaggcaccagagaggagataaagaccaagggacagagagtaagccaggcaggcagaagacaaaggcaaggagatgtggggagtgagagaggagccgagaaggtgggcacagtcaggctggctgagcacggtggcagggaagcagggagcagaggcaggaacaaagagcagagaggatgcagggggacagagagaagggactctgtgaggactggcagaggaggagccacagcccccatggcgatgtgggagcacaggtgtggacccagccagcacctgctgcccggggtgcctccccagggccttgcggggatgttaccgccagccagcctcacaccactggactctgcccccaattccacctgaatcccgggcctgacttcaaggggcacagggccagtgagccccaggcacctcatgtctctcccttcagcccacactcccccagtctagcctccccacctcccagcagtcccagcaactaaataatggggctgtctggctccaggccctgacactgcgcagagcaaggctagaggcaccaacacagcacagctgtccacggcggcgcctgccagcagaaggctccacctcctgcccagctccccctacccgaggctggcccaggcagagaccctgagaaaggcctggacagaaacaaggggtggcgcaggcattcctcacctccgcctccctaccaggcccatgtgtgagtacacacacaggcacgcacacacgcagcccaagccaggtcccggggatcacaggagggactgagtgtttcaaggcagaagaagcggaggctgaggaaatctgtctgcatcaccccaggcctagaatgccaggatacatggggtcctaggtggctgagtgccaggccagcctgttggccaacaggagacacctgagccccgtggaaactaggtgagagtgaagaaggggacagacagagattgctggcacagagttttctgggtcacagccccattttttggagttgtaacctggagaggggacaagtttgaacttgggctggggatctgggttctaatcccactccttccactgattcactggtcatcagacctctgcttctccgtccttccacctgcaagtcgaatgggttggattaggtgatcccacaataactcctctgcagaagggggcccatagccatcctctccagaaggggccagcctagactgggagggagggccagctccacctaagagcactccacacataccacagccaaaggaaagagccctcagccgctgctgccaagaggccaaatccccagcacagctacatcgtagtgggactggcaccgtgtttacagagcacggcccgttgcaggcactctctatgaaagctcagcacccttgtgaaggtccaaagcaaggcacgttatcccagaagtagaaacaggcccagggaagtcaaccaacttgtccagtagtgtataatttccagcattgtcttagacacaaacccaggacttatgggttcatattcttttcagtacacctgtggttggcaaacttttacaataaaatttcacatgagataatgtacagcatacagatagacctgcaactacctggtgtcattttcaatatatgacagacagaacagagcgcacagggctccggtcagacagatgtgggctccgttcccaactgctattttctagctgtgtgactgtgtgaacttcagtttcttcatcccccaaaatgaagacaacagtagtgtctacctccctgggttgtgaagagtgcctgagataagagaagtaaagcatttggcccagtgtctagcccctagaaaccatccactgccttcagggtttgagtctagtctcacagcccctgcctcctgccagttagaaccctgatttgctgtgagcgaaccttcttccacagggtgcagggaccatgccccctctagtgccgtccagtgatgccacagactgtgcacgcctgcaaaagcacagcctggaggatgcaaagctttgcagggccaccccagccaaccctgagcacacagggctggcacatggggctggctggcctggtcccaaacagaaagcagagcgtgctcactgtctacagcagacaagctccctgagggcaggagcctcatctgtcctgcccatctccaagagcctagtgcctgccaggctcacaagggttgagtcaatgcttatgggacacacgctaggaagcagcaaggtttgcacgcgttccagagccgcctctgcagccggattctgcccacaggaccccagtcctcctgctctgcccgccctgaccagagcccaccccaacagggcattcacggtgtgggagcagccccaccccgggctctgtttatccgctctccggaagcccagagcagctgtgctgggaggcggtggctgagtaaagacacctggcgcaggagagggtggcagggcggggcgctcgacagctgagacaaagggaactgaggttgcggggagaggcacgcacctcccccaggtgctgctgaagcgcagggcaggaggggggcagcagagacagccagagtcctgcagccctcctgtccctccatgacatctcccagacctgtcacctggcagcaactgccctaaggtagataggggcctgtgcccggatgtcagcgcacaactgccaatctgacctttaacctccatccacgcacgtacctgccatcccagctcggtctaactctagtccaacttgctctacgtgcccacacctgcccagggaaaaaaaggaccagaggagccagacccacagcctagcaactcctttgccctcctgaaaaccatctcagcagagtgaggcgcaggccccggaaccgcgcctcccacaggcacaccgcagggcccccgcccgcgtcacacccccacagaaccctgcccgggctcggggcgttctccagccgcccccacacccccacacccccacgcaccctgcccctcgccgtggtcccgcccctcttgaccccgcccctggtcgtggccccgccccggcccgctcctaccatctttccggtagaaggcgatttccactttgcgctcctcggcgcccagcagtgcctgcgcgatctgcgcggcagcgcggcgctgcgtgcgcggcccgtgcaggaagtcgcaggtgcagggtcgctgcatcacctcggcccgcgagtagccgcacagctcgcagaagccgtcgttgcagtagatgacggcgcagttctccacccgagcgttggcgatgatgaacttacggcctaggggggcggggaggagagtgcgcgtgagcggggaccccagcctccgggactcccagcccttccccacattctccactcacacagccgcccggggactccccgccacaggaagcatggctgggactggggtcccagcagggggcgaacgcagctgtgcgtgtgccccgatacaggtgcctggccggccgggccgcgcggcgcgccccctcctccgcctggcccgcgggcgggctgcgtggcttcccccgggcaggccgccagcagcccgccgcctcctccatgcccgaggctgaggccagcctggcgggtgtcagcaacgcgtgtcagcagccgcggcggagggataaacactgggcctagaaagggagcctgggaaaggccagagatggcggccaggattccctttgcatcggctctctggattctgcttttaatttccctgctctccagactggggggcgctccctgagccactccttatcctgaggctccctaggaaatcactccccgattatctgaggatcctaccaggtcagtaccccctagaacttctgcacaccacccccgccccaagggcagtcaggagctgaggggtgggtgtgccagagaggatgagggaagttacacgttgaacacctaaggacgctgcatctcattaggtcctctgacaaccccataaggtaggtgttattatcctccttttatagatgaagaaaccaaggctccagagaagttcggcaccatgcccaagtcttgcagcttgtaaatgatagagccagcttttgaaccttggtctggcagaggcagaagaataagctgagggtcacaggcagaagcccaaggtcataggaagcaaagagagggacctgcagctccaaaccctggacacacctggagcctgggcggggcctgagactttggccccacttgtaggaaaacagacccaagaaaggggacctgcccagggatgtgaggccttcctcagtttggcctcatcctggatgagcacccccatggttccatttctgccagacttggctccctgactccaggcctgcccggagagccaggctggcgagtgagcagcaggcaggcagcagcctcacttgtgccaggcaagatgctcctgggataagagctttttataaacagaagtttccggccactttggcctgtaatgctggggctttcagtagcagttggaattctccccctcccttcccctcccctccccagcaagcatagccctcaggttgcagccctaggcaatcctacgtgcaaagctgggctgcagcagggcaccctgagataggcccaggccatcaggacttggcctcctcccacctttctcgattctcccttcccctggcccccagaaagttgccttttggaactggttcatcttttggccagttcccaaggccccccagacctcccaggcagccatcaattccaggagtcagggtttcctgtcacctgaaaagaccccctaactcggcctccagctctgccacagtccaaggcagtccagaggcccagccacacaccccagcttcatagaagaaaaaccaccccttgtcctctctcccaggctggggaaagaagagcaagtttcttcgaaggcatgccccaccccaccacacacccttcactgagatcctggaatacagggatgggacagaaagcctgcccctcctccacagacctggaacctgagacccaaagagggaagagtcactcaaggtcacatggcagtcagtggcaaaggtagggctagaatccagcacccccccccacatccatcccagcctcctcgtaggcccgcccacagcctccccctgggcccacccccacctctcagggaggccctcaaccagtgtcattgtctccaccccctcaggatcatcttgttcctccgcttcacacaatactgaccatcggactgacccctccttcccccaaccaccgttacaagcacgcgttgtcctgtgctcacagggtcatggacaaggaatgtcatcctctcccaactcccagggcccttggcagtcacacccactgtggctcatgcagccttagggacaggcacatgaatgctgcccacccccaggacatttgcctaatctgggacccttctagaagcctccctaccaggcaggcattaggggtgctgtactcccggtccccataagggaattaggtgacagtctccagggcaagaaaacccacaacttgggggtaccacagggagctgcttaccctcaaagcccagctctagccccaggacaccctgtctccacagagcccacaagctcgcagccttgtcaaagacacctccccaccgcccatacagggtctaactcacgggtgacacatgggctcagggttatatacacacggcacacacaagaagagattatgagctgaccctgcatccacggcttttcagtccctccggcacaacacagtcaagatctggcaagaccagtgtgcgcgctggactctcgggatcccagggtttgggtcgtacacactcttatgcccttgcacacagccccatccacgtccacgcacccagagttggggacacctgcacactccatcccacatcccttccctgcacactcagcgtgtcacacacactccgatcccaaaagcctgagctgagtttcccgccccaagccccaaccccaaaccctttggcccggtgcccacggccccggtgcaccaagccttgcccccgccgtcccctcgccaaagcctggggcccaccaggccccattgactcgcacttgccgacgcacacggcccgggcacgcccccccatccacactcggaagagctcggcccgcccccagagccccctccccgctcagccccctcccccactcactctggccctcaaacttgcggatgatggtgtccaggaaggtgttctgcggcgcgacgtggcccctccgcaccggcatcctgagcccatgggcgggccgggcgggcccccacccaccccggcccggcccggcccagcactaggcttcgggtggcccggccgggccgtggtccccgcaccccgcggccaagccgagcacgggcgcggccaagactggactgcgggcgccgggtcctcgctcggctcccggctccccgctccggaccccgggcccggcctggagccgcctgagcgcgagccgcccgccgccggcacacctgtctgccggcccccgccgagccgcggggcccgctccgccgcgtccccgcgctgcgctccgcccgcccgagccccggactcctggctcccgcctgccaccgcgccgacagccgctccagcgcccgcggctcgggcagcgcctgcggctcggcccggccgcggaagggttaatgcggcgcgcgcccctccggctccggcccccgcctcccggccccctcccgcctgccgcgcgcccgcagcaccgccctctcccccccccatcccgccccaccgcgcgcgcccgaccttcccattggctgagccgcgccgagtgctcccccaacgccagcccctcgctctgccaaggagcccctgggactcgcgcgcccagaagagggggaagggacccttaggcaggggaaaccgtgaggacaggtgccatggccggcttgtaggcggccgggatgggggaagggattccacccccaccccagattagcgactaagaaacctgatttgaagggaaacggcgggtccttatgccctggttccccaccacgccgagcactggcttggtatacacagcacgcgctcagtgcctactgtgggtgaccggggcaacgcctggaccctcgaagacgagcccggagtcaagggagaccctggaaataggaaaagcaagacaatctgaaggccccagagcagcagagctctgaaataagggagggttaaacttagaaggggcacgccccctgccccaacacacacacacacacacacacacacacacacacacacatacacacacacacacacacacacacacacacacacatacacacacacacacggagagagagagagccctctgtggggctctgcataggagctgcacagagagggacattctgacagcagttgcggcctcctagctgcaggatcaaagagaggtccctgagcgcgaggttccaaccaggggatccccgggtgcgagcggcccgccctcccccggcagcccggggccagccttgcacgcccaatcggcgggctcggggccctgcggcggcggccacggcccagcccctcggaaagccctggcctagccgcaggcccctccccccggccagctggctcgctccagctgcggctcccttatttaggcaaggaggcctagggatgctcaagggcaggcggggtgtctgccccgccgcctgctcatcgcctgcttgcgtctgagtgagggtctccgggcgcggtgtcctcggacttagcagtcaggcagggccccgggaaggccagggcggggaggcgagtgttgacagctgagtgggcgggcggggagggaggagtcgcagctgaacagccgagggtcccctccctgcagccggatcagagacctgtctagatggatggggccatgtgggggctcctgagggcttgcagctgcctctgtccttggagcaggggctgggtcttgtcaccagcgagaaccatcatggggggaggggaagaacaaagggcagggaaggaatcggagtcccgaaggaggaaggcgcagaaaactgtcgtcgtgagaccaccctacccggactctcaccttccacccaggagcacaaagatgcaaacactggggccaaatggggccactggccagcagatgacactcttttttatttgctggtg

SEQ ID NO: 296 - DNA, 385755 bp, Homo sapiens
  source 1..385755: mol_type = genomic DNA
gaaatttgttgatgagcactctgaaggctgaagtttctttcttcaagattcacttccacattgactcccagaacacggggtaaaaatcagacctgatacatgagttctggcttatctggcatttgtcaactcagtctccattctctgtctcttaagcaacggattcctcttgaacatcccagagaagcagatcaaagggagacagtcgaggcagaagaagagactttccaaggcatagccttattcagatgaaggtgtttcatatctgctattcacaagtagccacactgcattcacagatgtacccatggccagggcccacaaggactttctgaggaaagcaaagcagggttgttttgggggaggttcacacctggtgaagagggtggaatgagatgtccctgccaccagggtcccttccaactcacggagcctatggtactgaatggcagccaggttttttatggagcaatagctggacttcacatttgcataatgccttgcagtttcactgttaagagtactgcattgtattctaattatatgaatctcggtcattcctttatgacatttctgaggaatactatctcaatcaagaaaagccctaattgcactcctctcctatcccggtgagagagcacagactcgtgcctgctccgcaggggtggaggctggaattcagtagtctgagtcggggatgcctggagcaggaggtggtcaggggcattgtcctttccaagtcaggaaggcagacagcacctgctgttggtgccaaggttactggacaggctgcgagggctctgtctgtctgtccgatgttcacaggccagctccccggaggctcagcactcagcccagcttctccgagatgcaaaccaggccactctgaggctgcctacaaactttctgctgagtgccgacagctgcttcctgctctgcggggagttcttccagatcctgatcaaggcacagagaattgatctatcagattaaccaggaaggaaagagtgggagagcgagtgtgggaggctgtggggctgagtgttttctgcgtagcagtcccctcccttctgacttgagtattaattgctacattaccgctgccatgtaagaaagacagtcagcaaagcctgggagagctccagctcctccctccctgctctgctcaacttcactctcctcctcggttcccttggagtaccttgtgccccggcagtgctgtcccggccctggcatcctgaggtcctcccgtggtgaggacttaagtggacagcaggagtgggtggagagagggagggagagtttgccctgcaggctctctggatgcagaagccagactcgctgcagaggcagctgtgctgttcccggagcctggcttcaggggtgcatccgtcactcagggttcattcacccaggcaggctccaagttcctggggtgcacaaggtgggcactgtcccttctgggtgctgacagcagagcctggctcccctccgccaccatgagcggctgctccaaaagatgcaagcttgggttcgtgaaatttgcccagaccatctttaagctcatcactgggaccctcagcaaaggtatggaaactggccttgacccttgctttctgtcttgatatggcctggctggtcgcattgcctcggtgtggtgagcgtgaccattctggtgcacccaggtcttggaaaaagctggggaaattggtggctgggattcgaggttgctgacaacctgcgtcctggctttgagtaggcgggcacccagccagggaactcagctggctgtaattgcctggaactttggaaatggagttggtggtgtgtggctgatacgttatgggcgggcagagggatagaaccctttccagagcattggaagtggcttagcgtgactggagtttcaagaagttatccatggaaggttgtattttgttgataaaagagagatttgatgcagtgggttgtgagtaattctgcagaacagagacgcttgagggggccagtgggaggtggtgatgggccggcatctgctttgccctggtggcttcagaaaccggatcagctctgcacctcaagtgccaagagcctcctctcatagggttccagcgtctcgtgcttctggggcttcattcatcgttctgctttcttggatccctgtccctccacatttcatgcctatgtccatgcctgtcttttctgcttctccaggaactggggtggcaggtggtttgcaggagtaactgtctgggcagatcagaaagtgtggctatggaccagaattagggctgcagccccagatgggcccacagccgggaggcagaaagaaggctaactcctcagggcccagtcctgtgtcttaaaccccattttacacttggcaccagggaaggtgaggccctcagaggggtctggccaactttgtggagatgatgtcaagggagagcagcagcatgatgtggttccactggctgaaaaaacgtctttaaatattcatgctgtctttcaggaagagtctttgggggctggggagagaggcactggaagcagcaggcagaatattcagggaaggagcccacaaaactttgatgggattttacaaaatgacaatgagagcagagaaaggctatatgcagccagatctcatgacatggctcaggtgcccgccacccagcgggtctggcccagtgtacgttgtgtggcatgtgtgggtggtgggaatgatgggattctgtttatctccttccttgggatgttctgaccttcctgttatttccctaccatccttctgaagtggggcactgctcttccaagatacccaggtgggctgagcccccaatgtggagggccaggctgcctggcagaattcctggaggccagaagtggggtaaacaggaggttaatgggtatagctgtgattgctctcagtggctttacctcctggagaaggagaaagcaaaggggttaggaaatttcacaaagtctccccattcaatcctcagagacagctggaaggttttctttcctcattacagatagcaggacctaagagggtaatgggtgtggggcagcaacccattgcagcctctcatggagggcttgtccccacctgcagtctagtggcgacccagaccccacacacagatgctccctggatgccacactgagtgctgagatgggggaatcatgggggtcaacaggcatagagaagagatgtctggggcagactaaggagtgcctccaaacagtgacatctaagctgagatgaggagaggcagggctgagaaggtgggaggaagccgaagctgccagagggagcaacatcagagtgttggcctctgcaaggaaccagctggagagtcagaatgcctccctctctctgctcagaatcccagaaactaagatccatgtgacacagaagggactccgtggggacctggccttcctgtgaactgcttcagtacagcctttcctgtggccagggctcagagaggcagcccatggcaggcaccagggcaggattgtgtcttaaccgcatctgtcttctttgcttcagctccgcagagaggaccaagtgtttacacagccccggctctgcgccaggcacgtgctaggtgactggtgttctacccgatccaggtgtttgctaaatatttgttaaatagtgaggaacatgggagcagggccaggctgggagcagggtagctgagaaaggcctgcagagagtccagaaaacggctttctaatgtttacacctcccctaggtggatttagattcaaccctacatggatacattatgattgcttaatgatttctgattttaatttgatttcacttattcattattcattgcactgagttctagatttgcagtaatccaaccctcaggagagggatttttctttgtcccttgcagaactgaggaatgtaaagaatgtgttggaccaggtacctgcttgttctatggcaatttactgtttcttaccagccttgcaaatacctgggggacaaggagggtccaggatcaccctccctgtcctgcctgttcctaacccttggccacctcctgccatgccagaaatccttcttgccatttgtctaagatgccagctagcccagatttctcatcagcgcttattgcagagataaactgctcatgtccacctgctcacatatctcatcaaccttgaactttccttcctatccctgatcataatttgtggtctgcattccctttaggaacatgtttgctaaaggctctcttccccactagacttcagctccatcatggcaagaccatgtgcatttttttgctcaccactgtggccagagctactagcatggggcccagaatggagtatgtgtgttaccgtgttaaacgaatgcaacggcaccgcacggcacagacaccagccgtcagcctgagatgacccctggtacaggagctttctaggaagcactatgcaacacctgtcccacaggtgctcagcaaatgctctctgaagtctgtttagctgcagcaagctgagtctgcagcctccagcctccagcctgcgtgagcctccagccacgtaaaacattcaggctgggtctgagcttgcatagtgtctagggaagggcattaagattgttcccagaaggaaaggctgggtgggcaggcttctggcatccccactcccacccctctggctctatttttatttgttttatttactggatttctcccacatttaaagaatctctttggcattaaaaaaaaaaaaaatttcaaaccacgaatgcagtgaggagcacagttggtttctagactgagacatccccggaccctgcactgtggctcggaagcctcggactgggtccctcacctccctggcatttagtttcctcatctataaaatggaattacaatacccttcttatggggttgaatgagattgtgcagataaagctccctgcctattaggtgctcagtagtgttgatggatatgacttctgttattagcggatactctcatggttgagagcccctccgggctgggactccctctcactcattacttgttttctcagcaccaggcacagattctaagagcaacatctcatgatcactttatgaaagcctatggccttgtcagttactgcatgactttatttatttatttattttgaggcagggtctcattctgttccccaggctgagtgcagtgatgcaatcacggctcactgcagcctcgactttctgggctcaagcaatcctcccacctcagcctcctaaatagctgagaccacacatgtgcaccaccacaaccagctaattttgactgtttatagagacagggtctcactatgttgcccaggttgatgtcaaactcctggctcaagagaccctcctgccttgggctcccaaagtgctgggattacaggcatgagccaccacgtccagccactggatgactttagaccactgcttcccctctgctcaacttgttttcttaagggcctacccagagccatctccctcacctgattccttattaggagttaaaagcctgactcccagagccaggtcctcgcctgctgtttaacctaggagaagcccagctcctggctcggatgcttggtgaaatcaggggtctggggaacctgcgtcttcctctttctgcacagtcagctcccctccacccgcctcacagacttcctgggggccgctggcaggaaccagaagttgtgcaggctccattctggctggggaggtttaaactcatctccttctgcactgggaacaaatgttaccccaggcacagatgacagagccaaagtgagcagaagggaggaatccaatccaggagagcttctagtgtcctccaggccacccatgaggctgcgggggtggggaaaaggggtgtgggaagatgagatctatctcaaggacaaggccctggagccgtaactctcccctcccgcccaggcccaggctgttcctcttttttcgaggcaaaacctcagctgccccatcagtgacacactgttcctcttgcctcctcccactgctgttcaagatcctcaagagactgaccttggacccgggcatggactctgccttcaagcaggccaggctggagtaccaactctgcctcttaccagctgtgtgaagttgtgtcatttgaacaccaccccaagccaaggctccccacttttaattggagataataataatatcaatggcacaaggctgttttttaatgtaatgatgatatgagtaagagatatcagctcacaggcaaatcccaactctgctcttgcagggcacccgcccccgcttacattttgtgccctaggcaccttccttgcctctttctagtcttgatcctggaggtagggattgcaatcaccatttcagcaggtaaggaaactggggtttagctaagtgtcgtggctcccctggtgagtggcagagctgggattagaacccaggtcttgctgcagccaagacaaggtacattcctctgcactcctagggctggagaagtcacgcctgcctgcactactccccaccttgccaccagcagagagtcccccagcgtcccactaattctgttggtgggtttttccctgctgggtctgatcagagcagccacctgtcatgcaaagggttgtgacaaattccataaagtgtcatcacctgggttatggggaaagggaacactccagaggccaagatcagcaggacagccatacccatgctctctcagtatccctatcacctctcaggcaggtgtgcaggcccaaagcacctgccagacactgagtaggctctgtcccatgagggccactcccccatggctctcccttcttacaggccaagtgtgagaagtgttcttgggtgtgggaaaatacacacaaagttttggacactaggcaggctggaattgaggtgttgcagctgtttactggaattgtctgggaaagcagaagccttcacactggggactttgagacctgtgagatatcatcatccctctaccaagaggagaatgccacctgtcccatgaaaagctaagcttcaatgctgccccttgctggggaaagagagtccccaccatccgagtcctggctcgctcactgtcctggcagtgaggggctgagcaagcactctggtcatgttacaacagccccactcactctctgcaaccctggaacctctgagtgccagtgctttgtcacaggaagaaagtttgattatccagggcttctgggtccctgcctacctctccagccccaagctagagcctgccaggaggggcatgtgttcaccttggccctcctgatgtccagtagccttcatcccagcctactggcctcaccacccttgcccctctgcagcaggcccagcattccctgacccatttgggttgttcaggtgctcagctcactagggtctccatagtcccacagtagaaggcagagaagaaggagggatcacctgcccctctggagcctccgggtctttctcctagataaccctgttaccatgcaggagtaatttgttcagggccatttatcctggcactgctgcacagacatcctattaacttcaggaccacaggggagcggctagtttgctccaaattaaaagtagctggaaacggggccctctggcaggcaggagagttcaggctgccacaccacagccctgggagaagtggatctagtcaggtcttcatcagccttctaagtccagggcctcctttgccatgccacagggaccctcatcttccccagtcttcttagggttacagaatctcccctgggccatctctctcagcagacccaggtcccaaatccctgaaagcctttgcttcccaagggtggaagtggcgatgtgaagtcactgtggaaggaagcaggatgcagggcgggaaaactctggacccagagggacctgggctccaaccctgccatgcaccaacaggacagccttgggcaagccattccccatcttgagtctgtgtccttccgtaaatgggccagtaatttccatctcatgtggctactggagatggaatgagatgggacatgtgacaggcacaggacctggctcatacaagctgctcagtaaaagtcaagttccccacccttcttttctatgatacgaccttggatttgtagccaagagaaacaaggctgagcctctgtgggtcaagtcctcttcccagctcctatccagatgtgctgctatttcaaaattatcccccctgcccccagtcactcttgatgacaagttctataattaaaaatgtgccaacaatggaaatgatcctttttatttagttgttcatgggagaattggtcatccattctcatgagaatgggagccctgtgaaagcgttcaccacgttcaccacgtgggaatcacctagagtgagtgcctcaagcacctgcagccgaggaaggaaggttgaataaataacgactaaatgctttccctgccgagcaacatcaggccatgtggctggagttccctttttgaggtctggtcttagtcaggcttgctctggagcctaccactccctatctcccttgtctgaattcctgtgctggagtttgacagcagtgaccagccagaacgacctggatgagacaagggtcagtgcaaacaagaccaaaggcctgttcctgcccccattccgctctcatgctctgctgggggactgcccctgggtgcaggcccacactgcctatgcatcacagctggccaggtgctcaggtgaggcggcggttcttccccgttgtccacctgcaccccacccagaagtgcaggaggagggaccccactgaaaggcaggcagcaggggagaggagctttgggggagaggatgtggaaatgaggaaattgcataggcctcccgggccagctggaggaaagaaaggccaggactcctgaaaaagactcatgggaagtcatttactatcaccactgaccacgctctctgtcacaggtcttcagtctaggggcagaagaaagccttccttctctgttaggatgaggggaggaggaccatgaacacaaagctaaccttggtcccctctggctgaagccactgagattccattttgtgttcttagaagaacacccgctttggagccagacctgggtttgagtccaaatcctcacaactgcttgctgtcttaggccatcaggctgcttatcaacctgatggcctaagctaccatacaaagacacggtggcttatcaacaacagaaatgtatttctcacagttctggaagctggaagtctgagatcaggatgctagcactgtggacttctcgtggggactcttcctggcttacagacagcatctcctgctgtattctgacgtggaggaaagagagtaagctagctctctggcctcttcttatagacacaccccattcaagaggctccgccttcatgacctcatcacctcccaaaggccccaccttcaaataccatcacctcaggagtgggatttcaacatgtgaatttgggggacgggaggcacaaatattcagcccattgcactaagtaaatggcttttttttctgggcttcagtctcttcatctctaaaatgaaggagctgctgatttcaaaggcctctttcagctttggaatttaaagattaaacaaaattgcagcactgctggtggcacctgccatgtgcccagcattgcctgagcactccatgcccaatattttatttagtgcacatgagaaacctaggaggtggagtgctctaattaaccccacttacagatataaagagcgagcttcagacgggggaccggcctgcttggagtcacacagccagcatgaagcatagccacaactggaagcctaggcggtctggccccaagccctgggttttacttccctccccagcccatccccagtacactctttccatttctgaaaatcagatccagggtaagaagcaacgaagacaaaacagattccttcccagtttggccaagaggcaacacacactcttgttttcgaaatcaagacttcaggacctccattctgactgaggaagtgcaattgaggagaatgccctctgagactcaagctccccgatccatcccctaaaccgttacccataggtcacctttcacagtcaaacaacaaaacatatggggagcaggcccgacagccaagactacagggaggggagaaaaaaggaaacaccacccagcaagatttcctgttgtatttctagtctggccaattttcatttattgctggaatgaggtcagttggaagctgaggcagagaattgggcaggaatcaggtagggaggtgtgattctggggcttgtatctgagaagctggggttagcctaattttctttctgtaatcttttgattaactgtgggccagtttggatgacatttttcaaaccatctgtgcttggcaggctgggccgagcccaggcttactgctcggtgtctgcaaaactcagcttggagccggctatcacccggagcctgggatgtctctaagccatgaagcatattggattgcagaatgatccacaacatccctgtgctgattaactctgcccaggcctcacaagttcagaaacagtggctgtcatttcaaacgcaacaggaaacatgaggggaagggccatcgccatcctctgttgagtgctacctattttctgggggctttacaaggattcctatattcagtccagccctgtctctgtgagttgtttttattccaaaccaggggctttgagaggctgaataacttgccaacatcacagatacagcactgtggttgaaaaggtcatgtgcaaacactaatgttcctttgaacacgcctggtcaaacctgtcagcaccgtcacttctgtcacagactgaattgtgtccccttaaatgtgtatgtcaaagccctaacccccaaggtggctgtatttgatgatagggccttgatgcaggagattaaggttaaatgaggtcataaggttgggatcctaatccaacatgactggtgtccttgtaagaaggggaagagaccaggagtacacacacacagaggaaaagccatgtgagggcaagatggccaactacaagccaggaaaagaaacttcatcagacaccaaccctgcccgaaccttaatcttggactttcagtgtccagaactgtgggacaatagattttcgttatttaactacccagtctgcgacattcgattatggcagcccaagcagactaatacagccccatagaccattctttgcatagcatcctttcctatatttttaactgtgacaaacatatataacattaaatttactattttaaccatttttaagtgcacagttgtggctttaagtacattcacatgttgtgcaaccatcaccaccaaccatctccagaacatttttcttctcgcaaaactgaaactctgcactgcacccactaaacccttccccatttctgtctaccctcaggctctggcagccaccactgtactttctgtctctattaacttgactgttctaggttcctcatataagtgagtcatgaacagtatttgtgtctggcttatttcacttagtgtaatatcttttttttttttttttttgagatagggtctcactctgtcatccaagctggagtgcagtgctgtcatcacagcgcactgcagcttctacctcctgggctcaagcaatcctcccacctcagcctccagagtagctgagactacaggcgtgcgccaccaccacacccaactaattttttaaaattttttatagagatgaggtttctccatgttgcccaacctggtctcaaactcctaggctcaagtgattggcccaccttggcctcccaaagtgctgggattccaggctgccatacctggccctcacttagtgttatgtctttaaggttcattcctgtaacagcctgtgtcagaattcccttcctttttaagtttgaacaatattccattgtctggatactacattttgctttttatccattgatggaccattcccatatttttaaaataaaaaatgaatcatatacgattataatccccttactggaaactgtctccagtggtttcttgacacatttagaattaaatgcagactcctctcagtggcctgtgactttgcatgatccgtcctctgcatttctgtccttctccttggactctttccaccaaatacccccaggctctctccctcaattcattcaaatcccctcctgcggttgccgtccctcctcatctcccccaacacattgcctaatgctgccttgcttttctgcacagcccttactgctcctgcaataatattacacatgtgtttgcttggtgattttaaatgttttaatggaaaatgtctatgtttaaggtatacagtgtgatgtcttgatacacacatagataatggcctgattatcacagtcaagctaatgaacatatccgtctcttttcatagttacctttctgtgtatggtgagaactactctcttagcaaatttcaagtatacagtgcagtcttatgaactacagtctccttgctgtgcattactctagagcttgttcattctccatagctgaaactctatacgctttggccaacatctccgttattcatttgtttatgatccagctcatccactaagagtcgagctctgtgagggcagggaattttgcctggccttgactacttccccagcacctggtgcagggcctaccacatggtaggccctcattgggagttgagaggttgagctggcagatgaggaacctgaggcctggggaaggccacccagcaagccagacgcagagctggccttgaatctgggcttcctcctctttccattccctacaggctcggcactgcatgccctttaaaggttccagttctgtatccaccatttccacgtccgtctgtccatccacacttcctccttagcaaggccgcccatgttcctgcatccaggacatgaggggttaattaagatagtcatctggcttctcaggctaccatcctaagaacagccctcctcagttctggagctggcgggccatttggttcatctttgatttgttcttgccatggagagaggggaacctgccgctgggaaaggatggcgatggtttccagtgtgctctgctccattcagccaaggggctcctctgggagggcatgaagtgagcagtcaccagcgaaggcatctgggggctgcagacgcagctggcttccatggctgtgttcccctccagcccttgaggatccaggactttctggaaacatgattttggagttcactggatgctgaatccattaccaccaaattgtgtgaccttgggaagtccaagggagtcactccttcgagcctagcctccttttctgtaaaatgtgtgcaataatgccaataccacaggtttattaaagtaacgcacttaaaagtgtttagtgtagggcttgtgtcaaattaaggattcaacaaatgatgggtggttttgcttttatttggctttgctgtttatcagggctgagcttaaatctccctcattgcatcctaggcaaaccagggacctcccatgtcttgggaaacggctgagtgactgaaatcacccacgtgggccagaaaagagtgagagatgttttcaacatactctttgcctttcctttccctacccgggatgcgagtatcagtgacaaagagttttattctagggagatgagacaggagagctcacactgtattcattgagcaagctcttcatgtccagaacctttaaaatctcctgtacactcctgccccactcccagcccacactctcctacggatgaaaaaataagaaggggcagtaaaaccttgtctttgtatagagtccaccgggggctcaacagaggaggtggaggaggcctcagacctggatgtcgtggcagtcactgcaccctgggtcagagccccctgaggacaccaccctggaagggagaagctggctggaaccacaaagccccatggacaagcaagctctggcactacctttgagcatctgctgtgcctgctggcctgtctcacagggcacatgaggtaaaaagacatcaggcacaggctcccccatgttcattatatctggaaatttcagtctggccaagggagcttctgagagcctgaaggtggccagtatgtgactggaagtcaaggccacatggcacagtgaccagcgtgagactcctccaaatgtcctcagtgtaagggtggggaaactgaggccagagcaaggaacacccttgagtaagctaccctcaaaacggagcctcctctggctggtagctgggggcacagggatggagggtagcctggcccctcctggaagtggtggccacccagcagatggctcttcattgccacacagccgatgactcatagactaagcccaagcaagacccctcgcctcctcccttcatctctgcactctccccttcatggcctcacctctgggggagactcccaagtctctctctcttgccttggctcttttcttaagctccaggcctgcaggtgactccttggctggactgtgaacttgttggaagggcaggggctacattttagttatttaagaacgtgcagtctggcacggtggctcacgcctgtaatcccaacactttgggaggctgaggcaggtggatcccttgaggtcaggagctcgagaccattctgaccacagcgaaaccctgtctctactaaaaatacaaaattagctgggcatggtggcacatgcctgtaatcccagctacttgggaggctgaggcaggagaatcgcttgaaccagaatgtggaggttgcagtgagccacaatcacaccactgcactccggcctgggcaacaagagcaaaactccgtctcaaaaaaaaagaagaaagaaggaaagaaggaaagaaaaagaaagaaagaaagaaagaaagaaagaaagaaagaaagaaagaaagaaagaaagaaagaaagaaagaaaggaaagaaagaaagaaaggaaagaaaggaaagaaagaaagaaagaaagaatgtgcagcacccagcacaagacctggcatagagtaggggcctaacaaatggatggattgatggaggatgggaggaaggaccactagacccttccagttgaatgtctttctatagcccctactcaatccttgtaaaaccaaaggagacctctctctcctgattttactctttctctttacatgtcccagtctcgagccttgttctttccatctgtcactccctttccactctcagaaccgttcctgaaatctgaacctttctaacctctcacccgctttgctgcagcagcctgcagactgcgtttcttcccatttcttccctttctgactcctccacaccattccaaagagatggcccatctaacccattgacccagaagccctacttctagaaatctattctaagcaaatcatcacagctgtgcatacggacttttatttagaggtattcattatggtattattgcattatttataacagtgaaaaactggaggcaatctaagtgtcaatggaaaaaattgtgtattaaataaattttggttcatctgtctgatggaacaatattaaactgttgaaaaattattttaggaactaattaataacctagagaaatgctattgatatcgtatcaagtaggaagccaggagaaaaaaaactgtatgatgaatgcagttccagtctgtgggaatagatgtgtatggaaaagtaaaatagagaagaaatacactgaaacattagtttaggttttagcttggattaaaggtgagtttttaaagtttttgtttgtttgtttgtttgtttgtttgttttattgagacagagtctcactctgtcaccaggctggagtgcagtggcgcaatctcagctcactgcaacctctgcttcctgggttcaagtgattcttgtgcctcagcctcccaagaagctgggactacaggtgccggccaccacagccagctaatttttgtatttttagtagagacagggtttcacaatgttttccaggatggtctccatctcctgaccttgtgatccgcccgcctcagcctcccaaagtgctggcattactgttgtgagccaccgtgcccggcctaaagttcttcttgatgcttctctgcattttctgaattgtcttcaataagcatccatatttaatcagaaaccacaaacatatcattcactaaatacacatcttcaatcatacagttctcagtatgggaacgcatgaaagttctgctttcactggcatatcactggctgttcatgccatgtggcaatacaccccgaactaccagatttggcactcccagccctaaccccacagtctcagacctcagcccactccctagtcctgtgtccccgtgaccaaacccacacacgcattctcctccagccaaactggtccccacatgtttccaaaccagccttctgttctgtgctcctcagcctaactctcaaatggttcagaaacacaaattcgcatgtgcacagagagagacagagacagagagaaaatccaaatatgataaaatactgatcatcattggtgaacctagatgaaggggaggcatgcttacaatttgcattgtagttggatattttcaaaataaaaagctggggaaataaaggagcagtgtagtatagtatttaagggcataaattctgcatgaaattaccttatttcaagttccagtcccactgcctattagttgggaagtagtaacattaggcaaggtacttactttctaagactcagattcttcatcagtaaaatggggataatgaaaatcctggtgtatttgtttcctacagttgcccagagaatggaatgtatgtgtgtaaagggcttggcgaagagtgccacacacccttgatcatgaactgttagtatcagtgctaaatatagaaatcaatttattaaccgtgactctattcatgatattctctacctccataagctgctcatccctggacaactaagtaaagtgctacagctttggaaacttttcttgcacggttctttttctgccactagccctggaagctgctccaatgcggtgcctgccccgctggtatccatacctccaggccctggcacagagcctggcaagggggaagaagccattaaatgcactgaaccccaaatgagaatctcaaagggttcaagctgtactttaaagaaaactcttctcatcaggaccaagtttgcacttttgctgatgcagccactctattcccatgggcttccttgagataaggcatcaccttgataaattagctgtagatataggcgtcttgcagttggcatgggaaagcaatttaatttccaattaagcctgatttctgggccaggaggttggcctacctcgcactggaaggattattctggccaggcctattattatcacgggtcatgattctcccatgaagtggactctcaaggaagctggtccttcaaccattggaatggttcagtgaggcagaaatacggcctctgtgggtaggaccctttttccccaggaattaagtttatacaagtagagtcagggaagttcaaagcaaagataggcagtctgtttgtggccaaaattgttaagtcagggtacccctagaaatgaagcaagaggggagagagagagggaggtgaggcagtcatcaatcaggcccacaagcaagagaggcgggaagttgctagtaagaaaaagacggcaggaggtagttctctgagcccaaatcgaaaagaatctgaattatcggttgaaggagacacacttacttgaagagagaacagacatttgtgaagcatcttttatgcaccgtgctgagtacttcacattcatgattgatgatacaatgcaccctgtaaaacaaacactgtgaggctcactttccaattgaggaaactgagattcaggaagattaaataaactgcccaaagtcatgaacaaggcagattcaaactcttgttttcctgagcttttctccctgcaggctccctctcaaagacaaatacaaaaacatcatttagggccataaggataatgccatactcagctgtatcttacccaccaaaattgtaagcatgagaaaaaggcctttcaaacaagtcctgagagagtgaaaataaatggtggctgaggctgcttggggcgaatgatctgatggaagagctaacaatatctacttctcttttgggtgttgtttttgctcccatctgtccctcaaggagggagacctgagacctgggcgcaatggcccagcatggctgagaggctcctgtgaggtcaggatctcctcccacagctcagactgcttcaaaccagcggggttctggcttgtggctgaggggatttcaattcagaagggttggaaagaaacaacagaggggaatgagggatcatgaccagtggagccacagaaaatttagttaggtgccaagaaggtatgacatggcctaagtttagttaacgatagtaaaagaggactctgaggcaatatgtaagcaagcatgctgtcaactcctggacaaattctagagcgcatgattaaacccatggtttgggaacacttgtgaaagaaagtagagatgaatgagaggcgggtgcatttgctgagaaggagctgtgccggtgtaccagtctcccttctgttctgcttttgcatagtgaccagttcaaggatcgctgcaaccatggtgtgcctgggttccagttgggcgtgtgatgagctatgggctggaaagcatagatttaggcaggtgccagctggcctcgtggtcctgtctgtcttggcagtgcccacagcagaacctttgtgggacattttcagatccttctgcttggccatcacccccacatctattgagacttcagaggtgtggccccagggagtcaattgagagcctgggctctgtgatggaaaggtatctggaagcatctaacaagctctcaatagttgaccttgacctgcttggcattttccacttttgatatggggtaaagacaagaacaggattcccagtggttagagtgttttctggagcaataccacctagatttgaattccagctctgctatttgctaacttctgccttggggcaagttaaatcttttccttgtgcctccattggctcattggtgaaatggagatactaataataacctcaaaggatgttgttactgttcaatgagctgtgcctggaaagatcctggcattcaggtaggtgttcaacaaatgctagcccttattaccgttaggaatgatagattcttgcacagcaagtgatcagctaaatatatgcccaaatgaaagtggctccatcttgctatagtgagttattcatccaaagaggtgttgctgcaggttgtcattgaagagaactattgtagaaagagtgtgactgtgttctccccgacaatacttctgacaccacgtaagagggttttcttcccccctactgataccaactagtttggacaccaactgggtgtcctacaatttaattcaattctgacactaactacccagagttagctcagaccccacaggttaagaactcagtcccacaagactgcccccattcaaatgccagccaccaatagggtgtcctgactatccacacttccacctgactgacagaacattcctacaacctcccctacacctccagataggatataataatttactagagtgatccacagaactcaaaagaacattttacttactattgacacttactattacatgttgattacagaggatataactcagaaacaggcagacggaagagacacacagggcaaggtatgagggatgcagggtggaggtgcagagtttccgggccctctcccagcaccttgacgtgttcaccaacccagaagccccccaaaccctattatttagggggttttatgaagatttcactacataggcatgattgttaaaccactggccattggtgattaaactcaacctccagcccctcttccctctgcagaggttgccgggtagagctgaaggttctaactctctaatcatggcttggtccttctggcaagcagctcccatgccgaagctatttacaggcccaccaagagttatctcactggaaaaaagacactcctatcgcccctaaaggacctctgtaccaaagaccaaatatctttctgtgagacaacagagagttcaagcaccaaatataaagtggagaagcactagatgatctctaaagtcttactggcacttggagaacaagtgtttgtatttgaacatgcggaatcaaaggggagttgagtaaaaggggctccagaattgacacaggaggaggactcagtgcagcaatctcatggggcgtggggacagaagacacatcccaaagcttcatgtgcctctcaagcccctgcttttgttttatgtgtactggggataggggaggttggtatggaatgatggagattatgggagaacagagtccatctaagccacttttgactctgcaactgggggagatgcagctggcctgggaaggaatcacaaacgtggtccagtactcagtttagagttgttggctttgcttccatatacctccctttctcatctcccaaatcctttgaggaagttggctggtgaaaatgtacttatgtaagtggggagggagagttgtgcaaagctaggaagaagctgagttctgcatcagaggtgacatgagaaagaaccaggaaagcactgtggagaggaggatgacccatcaactgactcatctgggggacaggatctgggagccagaggtgatggagaaaactaaagccctcctcctggcccccagtgggaatctgatggagcctggtggagagcctcacatttctacagggcacggtgtgggaggggcctggaggccttgtctctggatgcactaggctggcagttctgaagcttttcatcatcaggacccttttacatgcttaaaaaatattaaggatcctaagagctttggtgtatatgggttatatctattaacagttaccattttagagattagaactaagaatggtaaaaatatttaatttgaatttacttattttaaaataataatacatccattagttgctaacaaaaataacatatttttttgaaaaacaattatgcgtggcaaaaagtatattgggagaagtggtattgttttacatttttcacaaatctctaatgtccagctttagaaaggcacctagaatctcattgctacctcggcattcagactgttttaacaatgcatgttacatgacctctggaacattccattgcactctcataagagaatgaaaatgaaaaaggcaaataatgtcttagtattattatgaacagagttttgactttgcaagcctccactttgagaactgctacactggactgtagtgaatttctccatgtctctctgatctttctttggtcattttctttcccttccatgtgacagggcaatggctggtgaggtacaggaaggtggcactttgctcaaacagtgtcttcttaaatatttcatagaattcaaactcccccaaacacaagaccaattcaaagaatactggatattctcacataacagcctgtgctgccaatgaacaataaaataaatgcagtttgcaatgccctgacccaaggagtttaagataaattttggatgagttgttgatttagaggaggagctggtatcacttcagtaagtcacagaaaataagattatattaatatttatattgcattattttaaatctgcataatgctgagtcttcactgtgaagaaggaagcccctcacaatgattagtgaggggtagggagggagaatggcaagaagacaccaagttccttgcaggcaagcaaatagatacatcataaaagtgaagtgaaattccagtcctctgagatcttcataaatagaagaaaccctcatttctttcctcctctggttgcagcttggactgatgagctgaagctctgtctgagacctggcactgttaggatgtcccccagggttctttccaccccagttctggagctcaggtggccccttgcctctgaattccaccgctttgtctgagttctggaggacggcacatgggagaaccatccaggtgcacctctccaggtatgagtcactagtccatgagaggacaataataaatgatggaagcactagacactcattagcagagtggtttattaagaactgatgaaggttctctgctcccaggcagatattattgcaaaaaaacacgtaggcacagggtctaactccatcatgcctaaattcccattatttcatgcttatcccgtgcataaagttctgtgagcagcagacagttgtggcatttgctagaaggccagtctttattgacaggaggagaacatctatctcaagcaaatgaaggtcatcattaataatttatgggacagtgggggttaggcatcctcacatactaatttttctagaggaacatggccttttcccctgcagggattgtttgggtattctgagtttctgtgtattttagtcccaaattcaggtgcatggaaaccattgacaaaatagaccctttaaatcagactccaagttgggacttcctttcttatttttcttccttttttaacttaaatttttgagataattgtagattcacatgaagctttacgaaataatacagagacattccgtgccccctctacctaatgtccccaatggtaatatttaatattttgcaaaactatagtacaatattacaattaagactttcttaaaagactcacatgaggacctttgagacttccctgaccccagaaggaaaaaattccagggaatgatgagctgcctgcctttggaaggaaggtccaccaggtaagaaactggaggccacagggatacctctgggctccctggctggaattggcagatgctggtgcagatgccagggcctcccctcagaactccaacctgcatgagggcacctgggttccagggatgcaacgcagctccctgcctggcccctgtggctttgagtggctgtgtccctcagcccttcacagctggctctgcccctcagcccttcacagctggctctgcccctcagcccttcacagctggctctgtccctcagcccttcacagctggctctgctgagttctgtggttgagatgccaggtactggaacacacagctccaggcttgagtcctagcccctcactttacagatggccttggccagttacctcttacagcctcagtttttcatagtaacttagatagcacttaccatatgtcactatcctaggaaatttacataaaaatttgtttcatgccaaaactctatggaaagatactattatcagtttcgttttgcaaacgaggaaacaggcacagaaaggttattcgtccaaagtcacccagcttgtgaacagcacagctggaatttgaacccaaacagtgcacatcccaagtccacatacttagccactgtcctctgttgcttctcatcatctgtgaggcaggttcaggagtatctcatttttttttccaaggcaaactaattagtacagtgcctggcacagaataaataagcacccatacatgccagataacattgtcagtataacttctggaagtttctgagtattcatgacttattcttttttttttttttttttttttttttttgagacagagtcttgctctgttacccaggctggagtgccgtggcgcgatctcggctcactgcaagctccgcctcccgggttcacgccattcttctgcctcagcctcctgagcagctgggactacaggcggctaccaccacgcccggctatgattttttctattttttagtagagacagggtttcaccgtgttagccaggatggtctcgatctcctgacctcgtgatctgcccacctcggcctcccaaagtgctgggattacaggtgtgagccaccacgcccggccgactttttcttgttactaacaatagctctttttccctgatcctctccctcctcctacctcccgccctccaataggcctcagtgtgtgttgttcccctctttgtgtccatgtgttttcatcatttagctcccacttataagtgagaatatacagtatttagttttgtgtccctgtgttagtttgctaaggataatatttggcctccagctccatccatgtccctgcaaaggacatgatctccttcctttttatggctgcataatattccatgacgtatacgtaccacattttctttaataatgggtactagacttaatacctgggtgatgaaataatctgcacaacaaactcccttgacacaagtgtacctatgtaacaaacctgaacgtgtaccctgcaacttaaaatgaaagttaagaaaaaaacacacacacaaaacaaacaaaaaaaactatagttgccattttaaacacctatgatgtgtcaaacattccttcagccctcccaactatccagaaagagtccttcttttatagatgaaaaaactaagaatcaaagagatgaaatcgggcagagtagagacaggattcaaacccaagatctgcatcttggactcacaacactggaagaaacttcagacaccagcctaacttcacacccagctcaggactggccctgccgaatggtcactcacctgctctgaaaatcctcgcgacaggacgctcacttcctacaccggtagttctctggctcgaggtgtgccacagaatcccctacgcattgttagaacacagaacattgctacccccaccccgtgcagggcttctggcgtggtggggctgggacaggggcctgagagtgtgcatttctcacaagctgccacaggatcctgatgctgctggcccagggaccacacttggacagtcatcgttctaggaaaacttcctggagtgggaatggtaaaggtgatggcttcttcccattttgcccttttcaaatctgagataggcttccccagcaggctcagtgccagagtccataccctcaatttaaataacaaatcctcctctatatcatgacctttcctccagagggttgtttttcattttttgttttttgttttttttttgagacggagtcttgttctatcaccaggctggagtgcagtggcacaatctcggctcactgcaagctccgaaccccgggttcacgccattctcctgcctcagcctcctgagtagctgggaccacaggtgcccaccaccacgcctggctaattttttgtatttttagtagagacggggtttcaccatgttagccaggatggtcttgatctcctgacctcgtgatccaccagcctcggcctcccaaagtgctgggattacaggagtgagccaccgcgcccggcccagaggggtttttaagattgtgtgttctgaatggcctgtctctgactggaacccaactccgtccccagacccacttccatctttttctgtgagggggacacactctttcaacttttccaaaatggcatctaccatggcttttctgattaaaagcaaacgaaacacacccttcctataatcaaaaatttagaaaagcagcaaaaataaaaaggggataaggaagaaaacagaaattaaccaccatcccaccgctaaaattttgatgagttctcatgtgtttccttgcagctgattgttgtttggcatacatttattaatattggaattaaaaatatatatggcactttatatcctagaaaatagtaatactgtaaatgtgttctagaaatgggagctgctgttgctcttattagagaattcaaacaaagaagggaggctcgctggggacagcttctgggggaggatgggtaccgctttgagacaacagggagaactcaggcacagaggtgacgatcatcgttctctgtggggcacatagtgatgcagccggaaacaggtatgagtcagttgagtggggacaggtaatagagagctagaactggctggccttatggcctccaaggcattggggagccactgtacattcttgagcaggcaatgacttcacaaaaggatttctcaaaggttagtcctgcaacagaagacagcgtggattggactggaagagtgggagggcaggtggagaaggcattgtgctgcaagtggggagcagccctgggggcccagccagtcccctgtgccctgacaagtggtatggcatggatggatggctctacttctgggccgccaggatggacaggtactggttgctcttcaccatggcgataatgaggaggccaccggtcagcaggaaggtgggccagaagagggagaagaggagggcctggggcccgtagaggcgctggaataggacgctggtttcgttcccccgaggtgcggagaagcagtagaagacctgctgctcttggaatttggctctgaccttctccacgtcggcccgggccgtctggtaattgtccacgctgcctgggatgtaggagcactgtggggagaaacaagagcagctgtgggcttggaaatccccatttcttagccaagggcttgatatggagtaaagaaaaataccagctttgtagtcgggcccctggattggagtcggggctttggtctaaagcttggcaggccatgcgctgtacaggtctggagagcacgctctcatttgtgtcttgtgtgtggatggcggtgctggagctgctcggggtacaggctacacacctgggcgcaggtcctaccttggagtcctggctctgcttggattggctgtagaatttttggcaaatttctcactctttctgagccctgaagcttcatcacttaaatgggtgaatatcggtttcaaaggatattatgaaagaaggacttcacacagagctatctaaggaaaccagggagggacacaggccaagtgggctgtgtatttgaaatcgagatcatgtgctcaattgcctacagggctcatgaaggtattgtcagagggtgaagcaggcaaagcaatgagatgacaggtgcccactgactcttgccttggtgccaggaagaattgccagggtgtggcagggcctgtcaatagggagagagccagctgcctccagacaggcagtcaccactccctccaggcaatggatgtcaggccatccagaagatctataatagccagacctccaacactttaagagaagttagaaaccagatcacacctgtaatcctaacactttgggaagccgaaggggaaggatcccttgagcccaggagttcgagactagcctaggcaacatagcaagactttatctctacaaaaaaagttaaaaattatccaggtgggcatggtggtgtacctgtagtcccagctacacaggagactgaggtgggaggatcacctgagcccaggagttggaggctgcagtgagctatgatctcgcaactacactccaggtaaggcaacaaagcgagatcccatttcaaaaaaaaaaaaaaagtaaaatattagctaaatttaaaattgaaaacctttgcagtttcaacctgtgtacagcaaacaaactatgttggcaagcgggtatttgacactgggatccaaaggaaagaaagaatgcattgaaaagagttttgtgccagcagagcatgacacacatttaattctgacgttgattattgttattaggaactttctgccctgttcagatgaggccagctggaaagtgatgcaaagcagtcataaagcggagttttatctggttttatctctgttctgagctgcaagtgtggtgcccccatctgcagcagaatacctacagggcccccatagcccaggtccctacccactctgcatcactgagggcgagacccaggaatgtgtgattccttcatgcacttaattttgccctagtgaaatcatgtgcaagatcaaaatgtgtaaaactgagacccaaatggcaggtgttgagccagattccttgcaggcctcggccactccctggatttatatgaggtgccaccctggaagctgcctgccctgagggcattcactccagcaacacagaggagggttgcactgtagttctcacagcctgggaaatgcagatgctgcactcagatctagggccccagccagccagggagtagctgaggctggggagacgctggctcctcaggaatctggcattcagagctgttggacactgccaggtcctcagtagcatataatccagcatcctgagctgacggtgagggggcctggcctgagtctctccaatgcctctgactgtgaccttggctaacctagctccttaaatagcagtgtggctatggagtcagacaggcctgagttctgagctgtgtgaccttggcaactgccacaacctcactgggccttgtaaaatgggtttgtgaggctacctgcctaggagaactgtcatggggattaaatgagatgatgcatgtaaagcactgagcacagaagcccagcacacgataagaactcaaaaaagtggaagatgctattattaataataatatgttttgacttatctatgaaattgcaacaacagctccttctttaccttcttaaaaagaggtctatggatgagctctgaagtagaggcttctgtccatcctgggcctagtgtatcctctgcctgctcagggttcctctggatcttttatgctgggcctgtttggcaagacactgggcaggaattcactcttcatggccaaacccagaagccggggcctgaatgcatcctttctctcctgtcctgggtccagctaagcctgagttatctgaatgatctgaaaccaaccagctttttcccaagccctgcagtgtaaggtccccaggacagacaatgggagggaatttagaactcacctgctccaggctaagactcacaggaaaagctgagggcagactatggcccctaccttcagagttggagggtgggatgagagtcttcttggcccttcacagtgattccagaggacacccagctagcctggagccccagccacttgaacccctatgatggacataggcggaaggagcagctagcccacaacccagctgcttggcaaaaacacgaagggcatttccactgcttcctcccagctcctgcagcctgctatcagcaccacacctggtcaagcctgggcggcaggggagaggacagcagtggctccagcatgtccttccttcacatcctgctgacagttcattcaggggatgctcctctgagctggcaatctcaggaccagggaggcagcctgaaaaccagcctgctctggcccatatcactcccggagaatgttaccagttattgaaaatttgtttcttgcattgggataaatcaagggctactgaatgccaacgcagaggcaggggtcatgggtaggagctgcctccagtgggccctgagacctctctccaccgggtggggccgagtcatactagcgatgacagaacacctgaccatcctgcactgcccagacccacttctcattgaccttcagcactctcaagatcccccagcctccacgccccatcccaggcaccctgccccttcccgtcccatcagccatcaagtccggactgtcagcatctcccctgctgcaggccacatcttggtcgtgagtgcttgctgcggccttggctcctctgtctagtaactggacccacacacctgtaggctccatcttcccagcccaactctgaaactctgatcatgccctaaagattcccattgccaacagcaataatttccaaccttagaatcaccttgggagctccatgaatggatctctgaccagagattccaccttgatatgtctagtgttggaccctagttttgttttttaagactcttacagggttctaatgcatagccaaagttgacatatcttgagacatacacactcacattttaattccatattgtggtgatcaaaggcctctgggaacagaccttagtctgccctgacagccttttccagctgcatacaccccatcatgggtcattttctgtagtcagccctctgatccctgtctccacctagcccttccctccgccatgcctcgtcctataggcatacccgcttcctatatcacctcattctctatgccttgcatcctgcgcctgcctgatgttaaaagcctaatccaagagcctttcttttttttttttttttttttgagatggagtttcactcttgttgccaggctggagtgcaatggtgcaatctcaccaagagcctttctgatacccccatcattgtcagctggaaaacatccccctcctctaacccctgtaacttcctctgttcttctccccggtgccaattcttccctgctaggcactgttcatgcatgagctctctcctcttgagtcctacaggcttgacacaggaggtgctcaatggctgttgaataaataaatgagaggaggaaagaaggaaacaaggaaggaaggaaggaaggaaggaagggagggagagagggagggaaggagggaggggaaaaaaaagaaaagaaagaaggagggaagaaagggaaaaaagaaggaaagaaagaaggaaggaagagagacagaatatgggccaactgatcgctttaggaaaggatatggtggtgagttttgtgttttggagggggagggtgggatgttgggatgcaaggatggaaaaaccatctaaatgtttgtttatggaggttactccagccctgagtccctggtttcctggggagtcaccgggattccactttgaggatctggccctgggcctggtccctcatttgactgaggttgtagaatgaaagtactaacactaatcactgcttttgtttgagtgcccactatccactcagcatcaagcgtggcactttatatacagcgtctctgacttgataacagctcttcaaggtgcagcattagcattccactttacaagggtggaaactgaggaggtgagaggctaagtggcctgcctatgtttacacagccagttagcggcagattcaaacccaggtctgtgtgactccaacacagaagagctagggctggctcagtctcattccagctgtgagacctggtcaagtgggttgatctttctcagcctcggggacagggacagttaggaacaggctcacacacctgacagggataaagggatgtgtccccatccctccagttcagtacctgctggttctggtcccgagtgtcctccgtgtggtacagcacagcccacctgccggcagctgacacgttgacccacaggcatgggtactggggcaccttcttgcccttcagctcctcctggtccctgatgttggtctcaatcaggtggcacttggattcctgggtccacacgctgaggagaccacacacatgcacacatacacatctcagaactgggtgacacacagaacacccatttgaacccattatcccctgggagcctctagagggatccaggactgggatcctcatcttgtcttcagcatccagcaataaaggcacatgaccccacagtccccggacacagggaggaattgtagaagctggatggggtcttagacattatctatatgactggttctcaaccttggctactcttgcaacaacctggggagcttctaaaaagattcccgtgtccaagctacaccccagagcaagtgaatcagaacttcttgggtggtttggcccaggccctgggtgttttttcaaagctccctgatgtgattctgacgagcagccaaacctgagactttcttatccatatcgtcttcattttgcagaggcagaagagaaactcagaaaggtcaagtgactttgctgagaccttgcaggacctgaagctaggtctgagtgggttggagagctgtgttctttcccctaaaaggagcagatgtagaaggggtttgagttgagccaggatgggaaagatggtggggacagtctctagatggtgcttcaccagattaagagtccagcctggaatcgcttcagcgttgtgaagagtgaggctgcagcaggcccgggagaggctaacaggttcatcaacatattagtaaatcagttgtgcttcaactcccaagtatcctgtgggagacccattgccagtcagaagggggctgtcagctgctggaacgtgcccagagcacaggtctgagacttatcctaaggacaggctgggggaactgagtgtctttgttccaaatagaacacgaattaggaattcacagcttttccttaaaatctcaagtggttgatatgtcatggagcaagggcatggaccattctctgagattcctgagcagaacttcagggaagcagatgctggctcaatgcagacacatcagaaaacctcaaacatgaaatgtatgttcagtgaggcaaggagctccccgtctcttgaggtattcatcaggaggctggatgcccacctgacagggaggcttcagaggggagagaattatgcagctgagctgtaaacatctgcaattctctgattcctcctgggatcaaacttgcactggaacctttgctctgattctttgctatttcttctgagaagggcatcatgtgtctgttaccaccacgtcctagatcatgtgtctgttaccaccaggtcctagaatctcagaccagtggggctcagttcatcctaccttccctgcacttgaaccctagaacctaagaatgagcatcgtcttgaccctgctgccttgaatgagggtcaaggagaggggtgagtagaaggccagggttccttacagatgccagacccttaggagagggttggggggtgggcaggccgggagagctcagtaccttttctggtagaggggcagcacagtcgtgaccaggatgtagtaggtgatgacggcacacaccaccatggttacacccaggcaaagggctcgtgtctctccccgcttctgggccatcaccagcttcttcaccatattcactgggggcagtgatcatttctaggtccacagaagcaaacagaagtgagatcagcccagttcacaggtgatccacagaaagagaggacaggtgagaggggaaggtactcaactattaatatcactcttgtttatatttggagctttgcaacttccagaagtcttgctttttggaccccatgtaagccttccctgtgcaattgagaggcaattgcagataaaagacctacggctcagagaggtaaagtgacttgccctaggtcacacagtatgtaataggctcagtaatggccccccaagatgtctatgttctagtctctggaagctatcaatgttactttatgtggcaatgactttgcagaaatgattaagataaaggctcttgaaggccaggtgcggtggctcatgcctgaaatcccagcactttcggagaccgaggtgggcggatcatgaggtcaggagatcaagaccatcctggctaacatggtgaaaccccatctctactaaaaaaaaaaaatacaaaaaattagccgggtgtggtcgtgggagccagtagtcccagctacaggggaggctgaggcaggagaatggcatgaacccaggaggcggagcttgcagtgagcagagatgcgccactgcactccagcctgggcaacaaagcaagactccgtcaaaaaaaaaaacaaaaaacaaaaaaagataaaggctcttgaaatggggagacaatattggattatccatgtagctcctaaatgtaatcccaagggtcctaataagagggaagtgaagggagattaaacagatgagaaagctaaggtgatatgaccagggagacagcaattagagtgatgtgaccacaggccaaggagtgcgtcagaagctggcgggggcaaggaacaatggctcatcccccacggccactgcagggagtgcagcctgcagacaccttggtgattttggacttctggtgaaatttctgtcgtttgaggccgtcaggtttatgatcatttgctacaacagtcataggtcccatgcggtgagcgagcagtacatgtgcatcatccatgcacctccttccacggcacttatctcacagggatacttggagtatttctgcccagaaacagttctgtggcagggctagctgggccgggcacaggcagggaaaggagaggagggccccagaaggcagctgcaggttgtcaggagaggcaggaggtttaccatattccggtgttttttttttttgtaaggaacattcccctacttcaagcaaagaaagaagaaagaaggcatcatggtggcctcagcgactgctttcttatttcagggcttgaagccacctgggacaaagcagaatgggcacattctgctggtggttgctttccttctctcctctttctttaggcagcaactccttgtttttcccctggacattgactccaccccaatgcaagcaaagattccaccctcccctgctaggctcctgatcgctcccccaggagtgtgagtcttgacaaagacttcaagaaacagcccctcaatctatgccgcctggagccacagagatgcccagccatggtccccgcgtgatttcccatggttccgcaagctgtcctagagcctctggtaaatttatttgctgttgtttttatttgtttaaagtaaccagagtccatttctaccaaaaataccaggaagctatcaatgtaatcctccattttaggggaaattttaggggaatttaggggaaattttagccagatatcagggggactttattctccttgccaggtccctaaagtaataaacatattatggtttttgtttgtttaattagccagtgtccgggtgacaggccttagtccaaagagattttctgcaaagtgctctattttctgctcaggcgtctcttaactactagactgtttcaaatattcagagattcttgactccctccccttagccaggctgccctcatacccgggcatctccgctaaagggaagagaccagggtcaggcaccacggatacccatcacaccttcccagtgagctggtccacctcccctatcgatcggcagaggtgacatccaatgacaactttttctcctttatttggcaccaggaggtgagtttctcctgcattctaatggagacattataaaagcacaagcaagcagaaattgcccccgacaaagagagatgttttattcaactctttttattcaatccttttcctcctgttctgtgatcttgtgggaatgggagagcccatgcctttttctacctggcgtcagttgaacaagactctccatgtattcacaggtaaagcaacagaatcacctggaggtaagctaaaagccccaacagcctgcttccccaggacctgcaagggtcactggcacttggccccaccccagatactgtgagacataaatcatttgaagccaatgggaaatcccatcttggaagcctagggctgagtgcccacaacaaagccatttctctcctgggggaactggatcgcacctgtgggggcttcctgtggctccttcctggctaatcagccccccccagcgcccagggccatggcctcctctgctatttggcttctagtgccctctcaggcccctgggcactcctgaggctggtgaaggcaggaacctggttttaccagttttaggagctcagaaggaaaggaaaggagaggcttccctgtcacagagaagtctggaaacttggcttattcaggtctgacccgtctctaatggtctgatgagattgttgcctgcactgagtgagtttatagagtcatgataaatcctcctaagaccatgcgtggggttcagtgtagatatgacttcagcaagaagttagtattcagcatccaaagggagaacctttggcgggaggaaggatgggaactgtcaatatcccccaagggacagaaagaaaaggaagaagtgggtttcagctatcataggagggatttcagttagactgtaagaagaacttcccagttttgagcatttctaaatatctctgaagttccaggatatatcttcccatttagaaaggtcacttgagatctgggatagattcagagaagatggagaaggacaaaggaaggcaggactttggagtgtcctgggtgacctgatagctgggtcgacatccttttccttagaaggacaaggaatagagtacattgttgaacagtttggtggggtgtggacagggcgattctgaggtcctcagacatggaatcaaatcctggctctgccacttacacttagcaaccacatgactgtgaaacgagaaccatggtacctgcctcagagagttcagctaaagatcaaatgccatattgagtatcagacatgtatcatagcacctagccccaaatcagcccccagtaaatattagctattactactaacgaaggaaaccctgaaagtttggagcagaagtctggacccctcttgatgaatctatttttgtcccacctctctaccggtgacaagtgccagcattggtgttaatctccaggctgcagccttctggccactctgagaactgggacctagagggccagggcgcttactaccagagtaacctggccactgtgccaccctccccactggccaccagaccacgggccctccatccagaaggacagccccgagaggaagggagtcctcctgcctgcctccctccctgccccgtggcaggctgctttcccctgtctccctccagcccggtcttcagagaaatcacttcccaagtgctttcaggcccggtactcacagtcttcccggcgtcctgtgggtcttgagcagcagacagtttctttctgcctggacccccgcccccaccccaaaagaggccacagagcttcagcaggaagtttggcctccccgcccgtctccagggaagcagcttttggtccccatctggggcaagcctccatgcccaaacatggtcaagtctgagcacacagcctggagacacagactcggagagcaggtacccagccctgaggaaggcagctgttacccaagccctgcacctccatcttcccagagtctcgtgggaaacagatttcaaacaacaacagacagcaagactgagaaactacgaaagatcagcctggtatatttggaaatatttcttcttctctctgtctctgtgggctggcaaagatgccagaaataggaaatgattctccttttgttggcatgaggaagggtggagttgggctggaggggttgggcttgtcactagtccctggcatatccacgctggagcagctacagctccctgcctttggcacttacgtgctgtgtgaccctgagcaagttatggcacctctctgggcctcagtttccttttttgtttttggttttactcccaaacttatcgttaaatgacctcagttttctcacttgtgttactggcatttttaaaacctactttgctttagggtagtgatgggagttagagacggtggggatttatggcaaggggagagaactgactttttaaggaccaactgagctgaagctgggagtagtgagagctccacaactgcttccaaccaggtccagggacagtctgctcaccaggggccctcccagagaccgcgaaagtacagagatttcttcctagcaataagacaagtgaatgtcagcatttgcaggcaaaaaacatgcttttagatctctgcttcttcatctgtaaagtggaagtaaggattaaaaatcagcaacaaagggcaggcacagtggcccacgcccataatcccagcactttgggatgccaaggtagatggattgctcaagcccaggagtttgagaccatcctgggcaacatggcgaaaccccatctctactaaaaatacaaaaattagtcgggcatagtggtgcatgcctgtggtcccagctacttgggaggctgaggcaggagaatcgcttgaacctgggaggcggaggttgcagtgagtcaagattgtgccactgcactctagcctgaacagagcgagaccccgtctcaaaaaaaaaaaacaaatatatatatatatatatatattttcaacaaaacaacaaaaacaatcccagatattggggctttcctaagtatcaggcgtggtggtagaaggcagcttatctccacccttcacttgacccaagaatcaaagaacctgaaactgagacttggaggcttgaagtcactggtgcaaccctaggggccagaactagattcgaagctggcccttccagatggcacagcttggtctgtctctgatgaccctggggctgctctgagacattaaaaatcacctcgatcatacagtaagctgccacctgaggctctggaggtcaccctgagtttccccagcccccagggaggtgggtgcagcctggccttccctgctgagcgagctcaccaccttcctccctcctgcctccagcaggcgcgaaatgaaggcagccactcaggcctccctgacacactctcaggcggtgagtgcccttctccacccctttcctaattgaatcttattaacaggagactacagtgtctgtttaatgggcaccatagcaccagagggtctaagaccagcttcagaccttgcaggcagattgacagagggatgtaggatctggaattcaatctcagaagagcaattttccaaggatgatcctctgtccactcagaagcaggaaaagtcctcctggggctaatccagaaatgccaggcccccctcctgcttccctgggggagagatacacagtgcaacaggctgccatttatgagtataaccgaagggctccttgctcgtgatactctgaataagttattaagggctacatattatttggaaatcataaacaaactttagcattcttcccaagggaaggtgggaacaaacagggaaggggggccgtggggtcttctgctccccctaaatgagccacaaccaaaaggcattgacaagccctgtcctcgagggtttgtgggtgaaaacccaggtcctttgctggctgcggggttgtgtgtgacagatggctacaggtggagggcaagaaaataacaatgctgcaacaataaatattgacggtttgcattagtacggggtgtcagagatcacaaaatatcttctctgactcttccaacagcttcttaaggtactagcacaataggctcacaatagaccactgaggtggagatttttctacccatttgatagagggagtaactgagcctcagagaggtgaaataaattgcccaagcaagttactttgcctctctaagcttcagtttgtctgtctctaaaatagagataattatacctagcccctcagtgtttttgaggaatgagagatcacctaagctacctgacacatagtatggagattgtcctttccaaagatggtcacaccaaatacttcccattccatgtgcccttttcacagtgtggcatcaacactccaccatcaagaggggcattgatgtctcttccccttcaccctgggtggagcttcgtaagggcctcaatagtagaatatggtagaaggacacagcacgatgttcaaggctaagtcatagacgggggctcgagttccccccacacgctctcgggacatgtacctgggaaccagccaccatgttgtaggaagccgaggccccgtgctccagctgacagcctcagctcagatctcagccaacagctagcaaatctcaccgggcatgggagagaacaagcctgcagacagttccagcccccagcctgccagcctcccagctgaggcctcagagaatgtggagcagagacagcccacctgctctgtgctctctctgaattccagagccacaaaatccacgagaagaaaaaaactaatgtttcatgcccctgcgttttggggtaatttgttatgcagtcatagtaactggaacacacttgcaagtgatttcaaagggggactgttacagttgctggtgatagtggtaggattaaaccagtgagaattaaaacacctgagattgctatatggagtgttacaggagagtttagaaatgctttatctaggtagggcatggtggctcatgcctgtaatcctagcacttttcgagaccaaggcaggcggttcatttgaggccagtagttcgagaccagcctggccaacatggcgaaaccccgtttctactaaaaatacaaaaattagctgggcacgatggcaggtgcctataatcccagctattctgggaagccgaggcatgaaaatcacttgaatccaggaggcggaggtcgcagtgagctgagattgagccactgtactccagcctgggcgacagagtgagactccatctaaaccaaaacaaacaaacaaaaaaagtgctttatctactcttaggtcacacactatggcacaaatggaatagaagggcagtgatatgggagggtatttttgtttatgaagcacctactatgtaccagggaatgaccacatagatatgcaatacatacacatacacatacacatggacattcctctccacaatcccccacaaaaggccttgttctttctgtaaaagcacaaggcaaagtgattttcccaaggtcacgcccctagcgtgtgatgtgatggagcctggagtgcacctgtgcccgctgactccacagcccgtccctgcccctctgtcaccccatgactcccttgggagcagttttcaagagaccccaggtttcttcatgatgtctgcttccactgctttccagacaccctcagctcagtctgtacccctctctggattatgcacctgcttgtttatttaagtctttctgaatcaatatctcctctctgctgacacttgggataataagtcccataaatcaaattggcaactgagtcttgagcccctgtgtgtgcctctctgagtgctgcagggatgggtgttagtcactctcagtcctagcgaagctgtgcgttcacagacatcccagcacttgctatgcagaggctctggatacaccactgtgccgaggtgactcagacacggtcccttcactgcagaaaagcgatgccagatttcctcaactacaaaaatacagaacagaaagtgaaagatgtgttttaaatgagagacagtaataaaaggcagaggaaataacggtgggaggttttttagtagagttgagatgacaaagtataacaacagcaaaagtaaatgccgatattacaattaaatggtcacacaacaagacacgacaaaaaacatggtaaagttgttccctgctgtgtagggtgatactcactcctttttcctctgactcttttcaccatattttcccttggcctgatttttcttcctttatcctgccatgctgttaacataattgtaagcaccttgaaaatcctctttgagacaaagaggagcataaataaataaacagccctgctgtctgtctgtgtggtaaggttggtttttttaaaaaaatgctttttccttagtgcaaatcatcccagctctgtgggaaagtggcatgatgtggaagtgcagggagaagatgaggtacagtgttagcctcactgctcagagagagttgctgtaagagtggtggtggccttttcaacacacataaaggaagcatgtgccctctccttccatggcacatgtctcctctgtccttgcctcctggccagctcttcctcttccacaggactccccgctggggccttccctcgcccccagccccttagccactctccgcgcctcctgggccaggcggaagctctgcttccgcatgctgggagcaccgcatgcctcttctgcagaacacttcctccgcctgtaatttaacatttattcatgtgcatcctccattaacatgtctcctaacccaagggtaagctctctaaaatcagggactggaaccgttcttattcactgccgcatctctagcgccaggaggaataaacaaagatcttgcggttttgttgtcatcgtgctttggttttcgggaaaaaaaatctctcgcttttttacataacagaatattataatcattttcccatgccatgaaacatttttcttctttaaattgatatattatagtttcacagttgtacataaaacacttttctttcttgaattttaattatagattcgggggatacacgtgcaggtttgttgtgagggtgtaatgcgtgatgctgacgtttgagcttctattgatcccatcactgatagagtgaacatagtacccaaaaagaagattttcagcctttgccccactccctccttccttttggagtccccagtatctattattcctgtctttatgtctgtgtctacccggggattagctcccacttagaagtgagaacatgtgatatttggttttctgtttccgcattaatttgcttagcataatggcctccagctgtatccatcttgctgtaaaggacatgatttcatcctttgttatggctgtgtaatattccaaggtgtatacgtagcacactgtctttatctaatctgctgttgttgggcaccaaggttgtttccacacctttgctattgtgaatagtgcggcaataaatgtacaagtgcaggtctctttatggtagaatactttattttcctttgtgtatgcatccagcagtgggattgctgggtcaaatgatggttctatttttagttatttaagaaatctccaaagtgctttccacaggggctaaattaatttatatttccaccaacagtgtaaaagcattcccttttctctgcagccttgccagcatctgttatttttttactttttagtaatagctattctgactggtacgaggtgacatctcattgtggtttaatttgcatttctctgatgattagtgatgctgagcatttcaaaaacatttttctagaaaggctatacagttttctaggttatggctaagtcgggatagatttcatcaaagccatgttgtcagatatttaagaagggtacttgcttccctgcatgcttgtttgtgtttagcggaaggcagagtccgcctctgctatgggcagacctgttttattctctacccctgaaccacacccatgcccagatgtcatttttcatgaatggacaggtataagggagactgtatctataagcacaaagtttggggaccagaacaggtggatagagatggcaacatcatagaagtgggagatggtgacaggttggcaattgctcaaccctgtcccaggcctgacttgagccttagtgagtgagagagagcaagagagagaaagctgttgttagggcttgtgggactcagaacacaagaaatgccactttgggacctacgaagagggtgtttccacttctgcttagctgtggccttgggcagtggccctgacagataatggccatcattatcatctaaaatagctgcagcaaaggtagactcctgtgtgaatcggtgtccctaggtgtgctgcagctggctcacactggcaccgtgagagcctttgcaagccaagtgttcaaccatcaggagctgaaaatccaccacagtgatgggagtagctatactgtggaaatctacaaacaatacacatcagggcttttgtctttttggagagctgttttgccagcacaccactttagaggatacacttcaactgggaaacctgaggaggtattaggaatgaaggtgtggacaggttataggaaaccacagggaacagtgacctaggggctcgcaatgttggttgagggctgagggaagggagctctgtccaggatcagcaggagaatcttcttgagaggggatgctcccagcctggggagaccctcagggaaggaactggggaatggactgctatgctcactctcctggaatgtgttgatgaaaaagccaaactctgcaaattatttgaagagatttgttctgagccaaatgtgaggaccatgacctgtgacaaggcttcagaaagttctgagaacatgtgtccatggtggttgaattacagcttgattttataaatgttaaggagacagaagctacaggcagacatcaatgaatacacataagatttacattggttcagcccagaaaggcaggacatctcaaatggggatggattcaaagatttcctggtggattcaaagattcaaaggtggattcaaagatttcctgaatagcaattggttgaaataattaagttttgcctaaagagttgaagtcaacagaaagaaccacgaaggggggttatggaaactaaggttattattatatagatgaagcctccaggtagcaggcttcagaaagaataaatgataaatgtctcttaccagaccttagaaggtctgattagactcttagttaaatctctctgggatgagaaaaagacttagaaagggaaggggagtctctgcagaatgtagattttccccacaaatgacaactttgcaggactatttcaaaatatgtcaaataaatatagtttggggttaaaatacttgtttctttcagagcctgctatctgtcatgtgatgctatactacagtcaggttggaatttggtatttattactacaaagagtctgtttgtcatcttaagacctctgttttaatgttaatgctggtaagttgtgcctgaataccaaagggaggaaggtattttattaagaggcatgtccaacatcccctccccattatggcctgaactagtttttcaggtttctttgaaatccccttggccaagaggtgggatccattcagtcaatcaagcggcttagcattctatttttggcgtacagacccttctgcagacacctgatctcctttggttgaatccaactggtagacagacaaagagcttgttgctgcagtccccagtgatcagtttccagggcagagccagctagagagtgaggaggggtcaggaggggcttacatagatatcagtccatctccctgtgtatgtggctttgggacaggaaaactaggtaagagcaaaaaaagagggcttgagcacatggggactccctgcaaatcccccagaaatatttgtaggggtctgaaaggtatgtaggtagggactctaaacatttgtaagtcaaattttatgtggctaatttggagccccaggctggtaagagctcaggaaactcaggttccataaacagtgcctcattaaatattctttgcataaaataggttgatgaaaagagtcaaactctgtaaaatatttgaagatatttattctaagccaaatatgagtgaccaatggcccatgatgcagccctcaggagaccttgagaatatgtgcccaaggtggtcagggcacatcttggttttatacatttttgggagacatcaatcaaatacatttaagagatggcttggttcagtccagaaaggtgggacaacttgaagagggggctgccaggttataggtagatttaaacattttctgattggcaattggttgaaagagttataatctatagaaagggatgttggggttataataagaggttgtggagactgaagttttatgatgcagatgaagcctccaggaagcaggcttcagagagaatagattgtagatgtttcttatcagacttaaggtttgtgttgacgttaaatgctggtcagcttttcctgaaatccaaaagggaggagggcataatgaggcatatctggacccctctttccatcatgacctgaaccagtttttcaggttacttttggaatgccctggtgagagaagggatccattcagatggttgggaggaccttaaaattttatttttggtttacgaatgtttgcacactttttgttatttccctagaataaagactggacctccaagccaaaattctagggcaaaaggtttctacatttttaagattttggtatatatttcacaccttttaccagaataccgataccaattcttgtactcactgctggtagaggagactggttaatttcacacataatcaccaattcttaacactcttaaatttggaaatatgtgtcttttggctaggtgaaaactctttcatctgtttttaaatttgctttctttagattactagcaagattgtacagtcctttatatgttcattggaagtgaaatattttatttgtcccaaattgtgatcaggaataaataagaagcccctgttttagaccattctaactgtcctttttctctggcaagattcagaggcccaatcttcatcagctgctctaagtggttcaggtcaggaccggctccaggggctgaatgccccaccccaatccctcccagcctctcagcatgggcagggggttttgagattataaacaggttattctgtaaactttctttgctgagccatagaatgtcagccctctaagggcccttagaggtcatctaggcttgttgctggaaaagagggtcctgatccagacacctagagtggattcttggatctcacgcaggaaataattcaaggagagtcacagaggacagcgaaagaagcaagtttattggaaactactttgttacagagtagggcatcctcagcaggaggaggagcatgccatcctttgtgagtgtgtctacttgcaagaaattagaaggagctctacacttggaatgtgtagatgtgcttaccaaaggtaagggctattggtgttatcaatgaccatgaatcttttaccctaagcctgctaaccgatgttatctttaagtaaaattggctgtactcttaagatatccggacattgtacaggcttgctgggagatgctctgtatggccataaatattacataattataagtggtggtcagcttagaatttggctattttcagaccattagcattaaccttaaacacgctttgtgaatgcctgcctgctcacttcaatatggagtcactctagtcgcattttattaaaccagaggcctggtaaacaggggtttctataacaggcctacatgaccactttgtccttgagtaatgttttctatttacaaagtaatagaggtaagtcatagagaacttgataatacagaaaagtaaaaaagggggaaaataaaaatcaatcaagattcaatatcctgaggaaaccacagtcaaaatattagtggattatgttctaaagattgatacaaatcctttctaaaaacaaacttaggaatatactatacaatttaaaatgtgttcttattttaaatagaaacactttccccatttatgtaatattgcttttcaaaataccagtacttcatggccctataatagtccatcatatagatatgtcataaaatgttttactatttcctcttctgagacatttaagctattttccaggttttgctattataaactactctccagtgatgatctgttcatgtcatctttgctcacctctctgattatttccttccaacaggttcctaaaagcatgatcagagccaaagaatattagccattaaaagcctctgcctcttctctttttctggaagcataggatctgataaaatacacacctctgttctgttggtgagccatgtgagctcagacaggtgcagtgatttgcccaaagccacatagctttgttagaccagggattggaattcaggcctgtctcgacagcctctcgtgagtgccagaacccagccaggagtccatgcttcctgactcctatgccatattcttgccttattccttgcattagtccgttttcacactgctataaagatactacccaagactgggtaatttataagcaccagaggtttaattgactcacagttctgcatggctagggaggcctcaggaaacttacaatcacggaggaaggagaaggggaagcaggcacctcttcacaaggtggcaggaaaaagagagagaagcccaggggaaattaccatttataagaccatcagatctcatgagaactcccttactatcatgagaacagcatgggggagacttcccccatgatccaatcaccccccaccaggtccctccctcaacacctgggtattacaattcaagatgagatttgggtggggacacagagcctagccatatcattcctctttgtagaatatttctccactagtgagaactctcaattactgatcaccaacatgtgccaagaactgtgctaagtacttgaactgcagtatctcatttgatcctgaccctttgaagtggttactgtggttatcctaattttatagatggggacactgaggtggaaacacagcatttcttgtccaaggtcatgatgttagtaccttagagccgaaacccccattccttcttgtctgagcagtgtggtccaaacagaactttctgtggtggtggaaatgttctataactttaagccattcgatacaatagccactagctacctatggctgttgagcacttaaatgtgaacagtgtaagtggagaactaaacttttaaccttaattaatgtaaatggaaatagccacatgtaactagtgatattggataggtatctctggagccttaagtttccctgttccctccatcatagcctgactcaggcagctctgaagagggctcccctaccatccttggacctcagcctggggtgggactcagaatagccctcctaacacgccttgctaatcctgagccagagactctctctgagccaggaccttgtgcctgagacagattcttcagctgcctacagggctggcagtcccaggagctacttcctgtgggcatttacaaagacacactgcagagagaggctttttaatccccttttgttacacattaatgaaaatgtatgtctgtaatccataaataataagattgctcctgcaaagctcaaggtctacatttacactcagagtgaatattattatgaacttcactagaatcttctctgggagttctcagcagagcaccatctcccagaagactctgtctctaaggagggaagtgaaggagcataaaaggactgattttttaaaaatcagcatttaatctgggcacggtggctcatgtctataatcccagcagtttgggaagccaagacgagaagattgcttgagcccaggagttctagaccagcctgggcaacatagtgagaccccatctctacaatttcttttaatgagccaggcatggtggcgcatgcctgtggtcccagctacttgagaggctgaggtgggaggatggcttgagcccaggaagtcaaggctgcagtaagccgtgatttcgccactgcactttagcttgagtgacgttgagactctgtcaaaaaaaaaaaaaaaatccctcataatttactgagtgccttcttcatgccaggccctgcactaggcctggcacatggctccctacggtactttcatagagttgctgtgacacaaatcactacaaactgggtgggtggtttaaagcaacagaaatgtatttcctcacagctctggaggccagaagttcaaaatcaagctgtcagcaggcccgtgctccctccaaaggctctaaggggaaaatccttccttgccttttccagcttctggtagtggcaggcactccttggcttgtggctgcagcactccaggctctgcctctgtcttcatgtggccttctcctgctctgtcagtggcttcttctctcctgtctctgataaagatacttactgttggatttagggcccacccaggtaatcaaagaagagctcaagatcctttgtttaataatgtctacaaagactctttttttcctaataagatcatattcaaggtaccagaaatttggacatggacatatcttttgtggggaccccattcaagtcactatactcatcttattcaatctatataacaactctgagagggaggtgaattagccacgatggactaactgccgcaaccaccccaaggttttaatggtattatacaataacagggcatttctaactcgtgggaagtccaatatggatgttcctgcttgggaggctgtcctctaggtggttgctgggggaaccaggcttcttccatctgtggctgcaccatcctgtggccttgaggtccccctggagttatccagcaggtagactgggagcaggagaggcagagagagcatgtgaatcattgaacatctgatacacagacacattggcctggaagtgacatacgttactgatccttacatcccattggtgaggactagtcatgtggtctgcccagctgcaagggagtctgggaaatgtagcccctgaaggctcagtggcttctcagcatgagtatcacactcttgggatggaggcagggggaaagcaccacaccttgttggtcagctggccacggctgccacagtgtcattcatttacttattcttcattcatgtaattcattatttcactcatttttcagaagagaactttgaggctcaggaaagttaggtgatttcactgtcacagagcatttaagtcacagttcaattattatttattaaggggtgctgaattaggtgcccctcgttcacgtacgcctgttccatctttggatttaacccactatatgatttatctatatgcgtgccaggaacatgattggtaagactgatttacaccacctcccaaattgtactttggctctcagttctcctccctctctcatttgtccctttggagaatgggtagagagagctagagctggaaaggcaggaggcagagaggtaccagagataagagccagaaagggagggggtgacagaaagatagaaagaaactccacgtgggccagatgtcctagaaaagttttcctagtttgacatgtatgggattttggagcagattcagttaggaaagattcaagagcagaggaaaaatacgagaaacataactgagaattgtgaacatgatcttcttttatgtgtttatggaaaagcagtgactttcttctgaatttgtttaaagtccttttgtgtgctagactgtacatcttgactatgaccccatacagagggatggggctgtaggcagcatgaccacaggtccccatcagccatggaaaggccctgtttactcctgtcatctccttttactctcaaatgtgccctagtttgagtaaatgaagtggccatcctaactttggaggacagtggcttttgagtgtataggtctccttcccaaggccaagtgctcctctgggatggaagccgtggtcagcttatctctgaatgttcaggcatagctcaggccctaatgcatagcaggtgcccaagaaatgaatgcagaagccaggaagaaccgaactatagtttgagctcaggcctttacactccaaatgccagattcctcctactacgccggctttggttgaggagctctttgaacacagtgaagcaattaaagagtgactcctggtgtggagccacctgcactgcataccagagggattcacagaggggagctgcatattgtagtagaaaacagctcctaagcttcccacttcagagcctgtggggaagaagcagagtggggctgaggaccgccctccagaaaccactgtcttggtcctgcactagagcacatggcttaagtctcctcctgcatctcttgtgggcaggaggcaggggattataatgaggtcctaactctgaacacaaacatgccagagaggtttgaattagaactctccagagaggaaaattaagcttcaggttttagtttttaaaatgtgcatttatttatcagtgtaaatagcttaagcacagtcttaaaaattggaaactaataaaaaatcatctataattctaccatttaataaatgtactatgtgcatttataaatttttttccaagatttttttttccctttgtaaatggtttttctgtacatagttatcatcataggctgttgtattggttatccattgctgtgtaacaagcagcctcaaaatgtagtggcaccagatgctcaggattctgctgagtggttcttctgggctgggctaggctgatctcagctaggatcactcatgtacttgcagtcagtcggtcccaggggcctcccttgtgtcaggtggttgcctggctatcatgggtgacaggctagtgactatgccatgtgtttctcagcaggctagacgagcctgttctcatggtgacaagatgcagaagcagtagggaaagcagaagctgcaagtcctctagaggtccaagcttgaaactcacactgtcacttacaagcatttgattggtccaagcagatcatgaggctagcccagactcagtggggtaaagaaagtttatttcttgatggaggaactacaaaatattgtggccatttttgcaatctatcaggactgcgtgaagttttttacctttccatttttaatttattatcgcattatgattttttccttactaatacaaaggattcatgacattatttggatagtagacagactacagtttacttaagcatctcccaattattaaacataaagatgacttccggttctccagcacataaataaagctgcatggaacatcttgatgcagacaggtatttctgtaattttgattgtttccttgggatagactcccagaagtggattcaaccaggcataaatggtttttgatattctgataaatgaaagaaatatggattaaataatacatatgccaaattgccctgcaaaattatgctgctttacctccagccacagagagaaaagggattttcttttcttttttttttgagatgaagtcttgctctgttgcccagggtggagtgcagtggtgcaatctcggcatactgtaacctccgcctccaggtatcaagcgattctcctacctcagcctcccaagtagctgggactgcaggcaccaccaccatgcccagttaattattagtatattttaattttttagtagagacagggtttcgccaggttagccaggctggtcttgaattcttgacctcaggtgatctgctcaccttggcctcccaaagtgctgggattatcagcctgagccgttgtgcccagctgagaagagggattctcagcagcagcctggactcaggcatccttgcagggcctcctggcttctcttgattcattttgttttcctggtgcctcatgccaggaagctggaatgaagcacaactgggcagacccttccttgggcaaaagtattagtgtctgtggtcattgttctctgacagtcagttctgtggtacataacgattggttcaggcccctgtgatcttcttgtccatgtgagactggatgaggagtctcctggaccagtgatggtaacacctgcaccctgagctggggagcaggtggtatcacagacgagctcccatcccaggctggctctcacagtccctttccacagctgtgttaccagcccctgctcaatcatgtttccatgtgattctcatggaaaccttgtgtgattggcaacaccaagatttgtcccacatccagatagagactaggggctagaatacctctcccctgcccgtttctccgggcttgacatttcagccagacacctcttccacttcctcaaaacttatctgtctcctcttttacttcctcagttccttgtttgtctaaaacaccagctaactgataattgcatttatagttactatgttttcctcctagataacaagcttcattgaagattttctaaaaatatttggctctaatataagggaaattgggatcaccatgagcagtgagttggtgggagagagattgggggtacgtttatggaaaatcacggatccgtgggtctggaagttaaaagaggactggccctttgagcaaataaatgaagagtaagctggagagcttgtgtgtatagcatttgagggcaagggctctggagttcaacacactcagcctcaaatcacctacccattattggtcgtgtaaatgtggccaagttacttgactgctctgtgccttggtttttccatctctaaaatggacataataacccatacagggttattataaggattttgacaagaaatggcaggtagcaataattacacctactgaatttaaaaagtggctcaggcacaagaggtgagtggcctgttcaaggcagcatggcctggaagaccttcagcaggggccagtaagcttactagccctcatacccaggaaagcggtttatttctcctcccacatcagcatccctctcttcttcctatgtcggccccagaaggttcacaccctctccctcttaggctccttcctcattccgaggcctggagggtctttgcacagagaggaatctgcttcctgcctagagcttggagaaccccaggccttccgcattcatgaggtccaaggccaggcaggaggcaaggccatgggcccaaatctgtgccatgagtgtcaacagaagatcccaaagctggagaccccaaataaaaaccccaagagatgtgggggcatcagcttcctcagactcaacccagcaccattcagcagctttcaagaccaagaagtccatactgttctcttgctcgcaagatactcagcctatgaaatcctcagctaatggagtcctcagagcagcatggagccttgggggtgattttgaggaactgacactgggaaacagcctagggtctgtggtgcgcatggtgggcagcagcccttgcctgtccacaccacggaccagctaaccatagacgagttaagagtgacagcatgctactgctagcgggggaagctgcacgtgccatggttaaggaccccagggctgggtctgtgccccatcatgttgcgtaacaagaaagacaaggattgcaggtgctttcccacaactaaggtgggtgcagctgctgggaatgggagaaacatttatagatctaaggatgggcaggaatttagaaaggtaagggtactgtctgccttggctgatacttttatttccttctatccataagtgtaacaaaaaaatttttttaaatgctatgtaaagatagggaggtttgaaatttttaccaacaatcccaatccttgaacacaaagactattatcatatttgtgactgttgaatattttttaaagacatgttaatactacagggaactgcatttctatagaatgcactttggaaagcattgccctacagtatttataaatttcagaacacattttaggatctgccttgtgttgtttctgtcatcattttacatttgctagtcttgacttccaaccacccaacacgcttcctgagggcagggcaaacttggacattattgacagaacaagtgcccaatctgaaaatgtgtcacattcctgctcaggttccaaacatgtcatagcggatttatgggtgtaaattatactgtttgctcaaaacactacctcatcttcagtggcgtagtgacagtgaccttcaaactatggtggcatcttagctataggggtgtccctcaaaaagcatgggctttgttgaagcacaacttactctgctgtgtgacttaagtcaaatagcttaatctctctcagcctcaactttcccacctgtaacctgggcaggataatagtttttagcttctagaacagattaagggtggtaatatgagtggaccatttagagtagctcatgagataaaactcaaatgctagctgttgtcatttggctgttaatgttatcttgaaatcccacagtagtcaatagtggatggcattaattggaggagggaattgttagataaaagatggttactagatgatagaaggagattcaaattattgactggcagagaactgtttatggaagagttcttggctcgtaagagcctcagttagatagagcagggccattggagggagaccagttgcttgaatgcaagctgttaatcctcagggaatctccatggctcagccagatcctggtctgtaatctgctctcaccacgggctgactgaatgagctcattgtcatgtaatttaataggagccaggtgtctgtgatttccaagagcgtgagcagaatcatcctgcaccccaaactaggagggggaaaaacacctcgcagaagcacacttgtccctagctgctttccatgtgtcagacagagaggaaattgtccaattccaaatgcattcctatccttctcgggcgatgagagaaagtaattggcatagtttgagtgaaatgaaggtggtggtttggggtatttggtatttcttattggcataaaggaaaacttgtattttaaataccccctggcttcttgaagaacgctttctctgctgtcactgcggcccttgtcaaaaaaaccttagctgaaaagaaaaaagaatgcacagaaaaagagcagcagagtgaaggctcagtcaggcggtgggtctttttgcgtgggtatttgaaggaagaaggaaggtgctggagggaaagtcaggctgctctggaaacatttcagtcctggaacacctggtctctaaaggtgccatcaatagcacacactccccaggcactgcaaagtgggcaagcaggtggggtttgccagtgagcaaccctcagggctgcagaggcgggaggggcagtacggggagaggctctattctagggacccaacaatcagtgactgttcatctccagactcagcctgattactgatgcacccgagctcacacagacctaagaggcagatccaggatgtgaacactggtctggctgatgctcaagactgtgccattcctctgccctcatgccatctcctgaagttgaaatctcaaacttggctgtgtcaccactgtcctccttggctgggagtgggttcataatttacaaaaatccatcaggacactcccctgggaccacctgccttcagggtcttgaggcctcaaaaagttgccctcagggattagacctggggtcacaatgtgtgcaatgtgggtgtgaactcatgtgtccagttgctctcagcaagccaacaagttcaagtcacttctccatcccacggctttgctcttgtaacttgggaacaaacagtaccccatgaataagttcacagaggcagggttgtgcagtagtgacacgcacaggctcttgaggcagtctgggttccaatccacccctgccaccaggatcgccatgtagggttgtgtggcttatggcccgttccagagctccaggccaagatgacaaggggggcccagcctgtgccactctactaagccatggtccctggaattccaccgacagcagggtgtcttatgccagttctacaaagtattcacatgggcgaggcctggccctgtgtgctgctaagagctgaggaatttggttgagttacataccctcagtgtgcctcagtgtctttccctgtaaaatgggcaacataatgtatttctcctctgggttgtcatgagcattcaaggggttaatacccagaaagaacttagatcagtgcctaaagtctggtaaatactcaaaaacaagtagtaaatatctaagaggctagctgttagcatttgactggcatttttaagtgtgttttgctaaaggccaaatctgaatccatagtgttttccagttttatatgattttgttctaagatccagtgtaactatcaggaatcctgggcaaagccatcagagtgctgtgagcccctgccagccatcccgtctcatcagcctgccctgtgcagggcctcctgagtcccccactcaggggatcacagacacagtgcagggcctcctgggtcccccactcaggggattgcagacatagcatgggtgcacctgggtcccccacacaggggatcgcagacacagtgaaggtgtaccaggtcccccactcaggagatcgcagacacagtgaaggtgtaccaggtcccccactcaggagatcgcagacacagtgcaggtgcacctgggtcccccatgcagggtattgcagacacagcatgggtgcaccgggtcccccacacaggggatcgcagacatagtgcaggggcacctgcatgttgttcttgcaccctgaaatggaataggaaggctggcttttttttttttcttttttagctcatcttctgttttggaccaattaaaataaaggcattttaaataggccctgtggaaagggaactgaagttgtttccccaggctgagctctgcaccagaggtcagggcaggattaataaggaagctataaatacaaacaatggcccatgtctctgtgggcaatgtgctctggtttgggaggaagggagaaaattaaattataatgggaaaatataaattatttggatcaggataaaaaggaagaaatcagtggtgtctgaatgaatctcagtgaatctgtcagaagagttgtgaggttggctcagtgtaggtgcacaaagatgcctaggaggatggtggaacagggccccacacagacgcaggtgaaactccagagtcctgccttttactgttagccatgccccacctgtggaattcagtgctattctgagatgagagatgattgtatttgtcagattttctatcaaagtaaatatagatggtcacccacccagtgaatgtgattttagcaccttccctgttgcagaccctcccaggtactggaggtttagagggaaacagagccagctctatgttgccctcaaggagcacccagacatatcatgtggccaagatgattgcatccaagcgatgctaattgattgcagccttgcatggacctggccaggtgctacagctccttggtagcacttgctcacttttatttcatggtacctcctctccccgctagggggcaaatgtcattatgatgcccattttacagataaggaagctgaggttcaaagatatgaggggacttcctcacagccaatatgtggcagagtcatggttcaaacccaggggttcgtaccttcaaagaccaagttctcatccactgtgcagacaaatgttctgacagaggacaggcaggggacagagagtgagagaaagagagagattgtgtgtgtacatgtgtgcacatgtgtatggcagtggctctgtgtcaacctggaaggcttcttggaggtggtgatgtctagtggaatcctaaaggaaaggtcttaaatgctacactaaggaatttggattttatcaacattttttttcttttttgagcagaattcagacatgattatatccccccaacaaatctatatttaataagcaactccaaggtgccagacaatcttctaggtgcagagagggttgcagacacttaatataagatgtagtctctgccctttcctagcttcagtctagctggagagatgaaacacagatttatttagaagataataagtaacagtgtcaataaaccaatgccgagcgccaaataaaagtcagtgagtaggtgagtggaggtcagaagagggggcagtctgggctctgggttggtcaaggaaggctcccagggtagatggagagagagaggttggaggggttatggaagattccagaaagggtgcactttgagggctggggcctagtgtttggcagtactagttcccccatgcttagcagagggcctgcccatagcaagtgacggtgcatgctggctgaatgaataaatgttggacccaatgaaaagaaaggacaaacggttgagagatgaggcataacaaacggactgtgggttgcagggatgtgtgaccactgagcctctacccagcccaccaatacagtttagttgacttgtggccccaccagtcagatgaccttccttggctttccatttttttttaggtcatgcaggcacatctgtgggagaagcaagtagactctataggggaaaagcaggagaaaagatgggagaagccttgggtgacagaaggaggaagccttgaatgtgagtccaacatgttagcttttttcctgcaggcaggaggcagccattgaggcctctggacattcaagtagcaagaggtaaatgatttggggagattgatctggccctccaagggggaaagaggaaaaatgctataggagagggtttcaggaagtgactcctgctatttaaaacgtgcaaaccctttcatccagaaatgtgacttctggagatttgccccaagatcgtggaacaagtgtgaagaaacaaaaacaaacaaaaaccagcaaaatgcctcctggaggtccttgcagtgctgtcttgggtggagaaaactagaatgcagctttctccaggggtgcagtgcagagtgagggagcttgctttttctctgctgcctctcacctcagggcctctgcaccagatgttccctctgcctgaaatgcttttccctgccaggtcacatggctcaatccttatctttgctgaaatgcccccttctcagcaagaccttccctgatcaccctattcaaattttcttctgtagccccaccccctcatttacaccacacacctgccgccccaggcacccagcctcgtgactatctgacatacccttcattttatttgtgtatctcctgtccctctggaatggaaactgcagtggcgattgttgtctgttttgcacacaggcagtatcctcagtgctaaagcagcgctgggcgtagtaagtgctcagtgaagatctgttgaatgagtgaatgaaggaagggaggaaggaatgatggtgggtaaatcggcgagtgtgtggcctacacaggacattagcttgagcaccagagagcagaccaaggcaggtccttggttcctgtgccgacctgcattgcggaggactgcggggtcttggtagatgaagcctggcctgggtctttcagggccctctggctggggccaggaggcacagctgcagtggacactttcaaactcatcgtgcctggccttggcactcggtgggctcatttctggtcataatgacacctttctaaacatagctacacaaaattaaaatgtcacagtgcaaatgctgcagctgtgtggtactagaaagaacactaggtcttgagtcagaagagatggactcaaatcccaaatatcaagccatctctctcctgggtgtgaccttgcacttctctgagcttcagtttcttcatctgcaagatgggaatggtaccagtagctgtgtcacagactgttgtgaaggccgaggaattaagcacggcgagagatttttggaagctgcaaagcatcacacattggacatgacttttacacataaatatgtaaaaatggtctcctgactgcgtccttggcttcctggcctgccacatggaatgagggcagggcctccctctcagcacagactggtctcctccaccagcccagcctccccttgtcacagtgagaaggagccattgacccactcagaagccactcacttctctcttacatggggaaatcagcaaaccacaaccatttatgaatcctgcatgttcccctggtcttgtccaactgtatctgctaccattcctgagtggaagttaaaaaaaaaaaaaaaaaaaggcagagcaagttgaagatgggaaagaggtgacctaaggtgacaaagagtcaatgtagaaggcagatatgtctcatcctcgcagtgactaagattaatgggcatggagtgtcaggagccctgccttaggaagaactctgagactggctccagaattctgtaaatccaatcaagagtgttgcaatcagttagcaatgtctgcctcaggcaagggagaagaaactatggtctgtatgtcatatctaatattctcccttatatctaaggtaccctctgctgtgagacatgcaatcaacccgatgaagctttttaggaaaaagtctattgttacatcaagtttaacgtaaagctgcctccttacatattttaaggtcagcctaaaggtttctctgcacatcgtgaactatagcaagtagagatgtaaacagactgtagcctacacttgtgccgatcaatgagttttggccaatcaaatgtggccaactgtttgaaccatgttcaaacagggcaaatgctgagctataaccaacccagctgtttctgtccctcacttctgttctctgtgcatcactttcctttttctgtccataaatctttttccaccacgtggctgcgctggagtctctgagtctactctggctcaggaggctgcccaattcaaaatcattcattgctcaattaaactctttcaaatttaattctgctgaagtttttcttttatcactctattaatgctagatgttgactattgaatggatccaagtttcaggaacttacaaaatgtgtgtgtgtttgaaagaaggaaatcattacttgctatcccttctctatcaaaatctacttgagcttttcaactaaaaattcaatgcgtattctttggggtataaataaatgtgctgaatctacctgggcttttcccactctgtggcttcttgtttctatgtgtgatgcgaaaaggaagctgtggaaatggggaggagattcttccaggtgttgggaaggcttccaatgcccagcatgtagtaggtgctcagcaaatgtttgttgaatgaattttcaatgatgacctcagtttctgcataacttttcatgattcataaatgctgttaccttagctaagtttaaatgtagtattttatctcctgtcatatatatttttctctctttttctgtgagtagacgccatgataatcaatcgggataacccacgaggacgttgtttcattctttctgagtgaggggatggggctgatagaggaagccggggaggggtttgcctgctgatttcttcctgcttttgtgtttgtgtttgccgtctgcctgtccctcacatttccctcagtgtgttcctatccttggatccctaatcctacagcccaggactttctacaacggtactactgacattttggatgggataattctttgctgtggggggactctcctgtgtgctgtgacatttagcaatatccctggcctctacctactggataccagaggcaccccccacccccagccgtgacaactaaaaatgtctcaagacacaccacccaggtgagaaccactgcttagcctccccggggaacatggctggttccttctttctgaacagtttcagaaggaacatcaagtctgcaacaagtcttctgacttcatggtccacaccagtgtcaggcccaccgtcctatcaaccctccaggctcatgtctccaaggagctctctgatcattccctggtgtctctctcgtttgctgtctgcccctctcccctgggctatgagcgccacaggagttttttctattttgattatctctctatccctggggcccagaagtccctggcactcaataggttctccagtggataaaggtgaggacgaggtgactgggggagcctccctgtggagtgacgtctccatgccatgaaattgccagccctgggaagtcatgaggaagaacactccaggcagagggcacagtcaccgcacagctctcaggcaggaacaggtttgccttgtggaaggctgctggggaggagaggggagcgggattggagaagggtgctccaagagccagaaaagctagtcaggaggccacagtgaggggtgcaaactcagttccaggagtgacaacaagccctctggaaacctcccagatgtcccaaggtccacccctggcccactctcactctcctctctccttgtcgcccagcctcactctgggaaggctggggaggattcctaaatctggtctgaactcctgaggctgaagccagagctggtgtggcccccaagtcatatctcagggtgggagagagtccttccatcaaggaggcaacgctatgagggcagctcagtgctcagcccacccctctaaccctcatgggcgggccctcaatcagaaaccacaaattccaggctcagtcagggaaggcctggatcctccacttccggctcctcccggaagtcagcttaaagaaatgatgcggaggaatgatcactgaagagactcgtcattcctggtcaaaccatgctggaggtcaggggtttgttaactcagccttgtcacaggggccttcccttccacctcaatgctacgacagagctggtgttgaaggtctttgacgaaaaagctacatttctgcatttaaaatggagaagatcaggccactcagtatctccggtgtaagaagacatttggcaatagtaacagctaattttttttaatacttaccgtaactcattttacccatttcctgcctagaaaaaaaaaaagtgcagctcactgccagcactcatttcttggggcaaacaggaaataagttaatcttaacaacaaccctgtaaggtgcatagttttattatcatccccattttacagatggggaaactgaggcagtgaagtttagtaattttcccagattcactaaaatttctaagatatgtttaacaaagaaatccaccctttaactcttaaataatatcctctttttaaaattaatgctagaatatggtgcaatatctttttaattgagtgtatcttttgccccagcaattctaccactaggaactgagcctaaggaggtataaatatttagttagaaggatgcagtattatttagtatgtggaactcaatgagaatctccactaagaggggttatttaaataaactgtgatgcctccatataaatgtagctgttcaaaatgacatctgtttgtatgtaccaacataaaaagacatctaaatcatatattttaacagaaaagtccagaataatcacatttttgtaagcagtcattttgtctgaggactgggatttctattgacttttaatttcttattttcacgtgtctatagtctctaatttttctacaatgaacatgtactacatttataataagaaagaaactcaataaaagttattgagtaaaagaataagcagccagaaatctgtctcttctggggaattagtgagcctcttcctccctgagagtagacgctatggctgctttgctggaaccttccatttgtcccaaatgctccactctctgccaatgggagacggggtctatattcacctggtcccttctgcgtgaggccaccttggcagaagtcactgcccctcccaaggcatctgaccctgcaaaaccctcttgtcgtctgggttctggtaaactccccattccctgttttttttgtgggtatacagatagtaaaagctctgctgccctggccctggttttaaatgccccctggtgttttctctatacgccactgacaccttgatcatgagtcaaatcacctgaacatagagtagcatctgcttcctgttgagaatccaacgaatacatttacctgatttgctctctcttcttttcctaagtcctaacttcctaaaataaaatgactctccaattcacctgtccaccttggccttctctccttatacccagtcttgcccactagacgtcttcgtttgggcaaccacacagcttataagcctcctgatgcccaccacaggagtcttattttgtgctgccacgttaaattctctcttccatgagcaccactctttcactttccacccactccaaacctgaaaatcacctttctccacccctcctttaattttttacatctcatcagtgcccaaaacttctgaaatcaacctcagtaatgtttccttcaaataaccccttcccggctgggcgcagtggctcatgcctgtaatcccagcatttggggaggccaaggtgggtggatcacttgaggtcaggagttcaagaccagcctgaccaacatggagaaaccccatctctactaaaaatacaaaatttagctgggcagggtggcatgcacctgtaatcccagctactggggaggctgaggcaggaaaattgcttgaacccaggaggtggaggttgcagagctgagactgcaccactgcgctccagcctgggctacaaagtgagactctgtctcaaaaaaacaaaacaaataccctcttcccatcatttctccagcccttgcctcctcaagtcctcctgactgggttcccttggctccctgcttccccctcagtctgttatgtgtgacttctgggtaaaggttcttaaaatacaattcagatcctatccagtcccctactcaaaactgtgcccatgggatcaaaaccaaactctgcaacattccattcagagctttaagagtacttttcagcctgaggtctcctcctcaccactaacacccttccctccaatcaaactgatccattgtacctacaaaaagcccgtcccacctcctagcctttgttcacactgggttctctgctggatcaccatccctccacatttccaggtgtccctcaagactactcagcagcagctatccatacaagttcctcaaccctggctttcttgccctcaagtaaccagttcatcctccccagtcatatagccctctatttacatttcttttctggaagctatcatttttcacgtgccatttgagtgagtgtcctcgctaagacgatattttctttgagggcagtaacctttcttatatgtctctgtatcccatgaacttagcaaaaaacaagggacagaacaggtgcaaagtctacgtggttagtgaatttaacagatcttcctaacgtgtaaacgtcgttgtccaggtgaatggaagaagtgagctgagatagaggggacagacagagtcagtgtccagtgctgacctctgaaatggaaaaacatggccagtccttaggaggctgcagaggccaagaccccagtgaggtttgggggttccacagcagaggaggagctgtggaccacagcaggaccccgatgccatcagcaggggaggaagtaatcagagaggtggaggaaggaagccaagggaagtcaagtaaacaccaaatattccctcccggtccaatgctgtgacctgcataagccaccactcccccagtctagactctacccatggaagaaggaagaagatagaactctggatttgaatataattctaaaataaccaaatttatctgaaaatgactaggctgagttttctgcttcaaccagaaatggagcttggagtcagaaattatgtgaaattatagaagagaaagtcaccatcttccatctctgagtcgtatgatcattttagacataaaattgtgcacttacgatgtaccaagtgcttaatatacgtgatctcatttcaccagggaaactgtataattcattgctttaactgacaaaattctgcaactgaagaaggtgctgttaataattgcattgggacgcaggcctgagcaggccatgatttgtggctgtcctacatctgaccctcacagtatccatgggagaaggcagcatgtttatgccccctgacagctggggaaaccaacacttaaagtgattaagtcacaagtccaaaataaatgacagagctgcagttcaagcccaggtggtcatttaccaaaggccatgctcttttcactttgcatgggactgtgaccgctggctctacccagcttcccagtgcgacccttccccgcccactgtttctcttctctggccaacggaaacacaatgagaccacatatgtaacattacattttttcatagccacattgaaaagaaaaaggaaccaggtaaaatccattttaatatgatattttatttaacccaatacagttgaggcttgaacaacacaggtttgaactgtgtgggtccgcttacacatggcttttgttcagtctctgccacccctgagacagcagggccagcccctcctcttccgcctcctcctcagcccactctacatgaaaacaaagaggatgatgatctttttgatgatccactttcacttaataaatagcaaatatatgttctcttctttatgatttctcgtaataacattttcttttctctagcctcatttactgtaagaatacagcatattcccagctactcaggaagctgaggcaggagaatcacttgaacctgggaggccgagtttgcagtgagccaaaatcgcaccattgcactccagcctgggcaacaagagcgaaactccaactcaaaaaaaaaaaaaataaaaagaatacagcgtataatgcatgtaacatataaaatatgtgttaatcaactgtctatgttatgggtaagtcttccagtcaacagcaggctattaggagttaagtttctggggaatcaaaggttatacacaggattttgacggcatggtggttggcactcctaactcccacatcgttcagggtcaactgtatattcaaaatagtattcaaaatgtaatcaataggaaatagtcattcatgaaatactgcgtcttcttcttctcccccccaaccccacttctttgtattcagtcttcgaagtcagtgggtattttaaccttacagcatatctcaattcagattactcacactctaaggactcaatagccacgtatggctggggtctgccagccggacagcgaggtctagccctgatctgagcaggagccatttgattgggttgttggtacactgccatctggtggacagatgttccttgcttgaaaaaccacctcgaaggaaagtatcagcatcagggacaatagcacagtgggcctcaggatcagctccccggaaagagcttggggttggagggggtgttgttgctgaggatgtccccagagaagatgtacagccatggagcaaactcaagtcacttatgatgtcggcaaaccttggccgtggtgcactcttgtttcctggttgcaaaaggatttagcagaaaatggtaactctttttcagaaggcatatttaaagcagctctttaaaaagcaggagtttctttcacacccagtttcgccatgtggttgtgtgaagggcttctccccagaaatcatgtggtctctcttttaattcacagtaaaaacctttcttctgtcttggcccattatggctgctataacaaaatatcataagctggccttatataccatagaaatgtatttctcacatttctgaaggctgggaaatccatgattaagagttggtgtctggtgggagcctgctttctggttcactgatggcgtcttcttgctgtgtcttcaccgaggggtagggacaaggcagctctctgcagcctcttttctaagggcactagacctatttgccatggttccagcctcatgaactaatcatttcccaaagtccccacctcccaacaccatcatcttcatgattagatttcaatatatgaatttgggagaggatagaaacattgagaccatagcatctgccaagttgtgtcttcctcactcaaattgggtaggtgtggttattccagagtttcagtgaaccaagacgtatttttccaatgtgaataattaattaagaacacttgattagggtcaatgttattctggacttctgaatcactcccacatttgaaggggagttttaaacacaactttgtgtgaataaaatgatgtgtctgcatctctccaggaagcagtgtttggagctgagatgacttggcagggagaagaatccactgggacattcaataacttggcattgagagtgttttcagcaccatgctgtcctcagaatagtgttagaatttatataaacacagatgtgacttgtgccttgaaggagaatacagtcttcccaggagagacatgcaaaaccatcatagacaaacagcaagaaaacagcatcaaggatgtacatgcaccgggcagaatgtaaactggatgtaaaaccaagcatttgagggcaatgagaaaggaacttggttctggtctcaactctgccacccacagctgcgtgactatgtctctgtcacactgcttctcaggtcttcaactttatcgtctcatactgagcaagagacagtctggacaatttatgcttctagaatggggagacaagaagaaaagaaagatagatacccaaggacttcagtgactggctcaggaagaattactcagcagtgagggggccagcatgagcccaggggcaagaagccgggacttggaacaggaaggaaaggtgctcagctggctaacctagaggaaagtgattggctggagtgtctggtttatctgtttcagggatggttaaagattgccccgttaataggcaaaaattgttgccttaaagaacctagaatctaaaggggtctttgacataatacagaataacaggtcccagagattattttacagaatgttagtacctcatgatattaatagatatataacaaaacagacttctttgccacaagacttctcagtacctttaacattttatgattttcccaaaggacaaagagtatgcagcatttcccagacttaaatttaactgtgaacacctgttatcctggggcaggcggattgcttgagtccaggacttagagtctagcctgggcaacatgacgaaaccctacctctaccaaaaatccaaaactcagctgagcatggtggcatgtgcctgtagtcccagctgctcaggaggttgaggtgggaggactgcttgagcccaggaggtggaagctgcagtgagctatgttcacaccactccactccagcctggacgacagagcacaaccctgtctcaaacaaacgaacttcagtgactggctcttaaaaacaaacaaaaacctcacagaaccctcactgctctagtcctgactttttatagatagggaaactgaaaagctaagaggcaagtccaaatttcacaaagatagtggcagagccaagattggatttttggtcttttgactctaatacccagtgaatttctttttctttcttgttttttttttttcaattcctattatacactatttaagacacacaaacagataaaaagactaatacaagatatccatgcaccaccacctagtgtaagaaataaaacatcaccaacacaataaaacccccttgtgtacctctctccatttgtctccccaagggaacccatatcctgaatttggagatataatacatgaaaattctggtggaatttcaaataagtcatattgtctttagaggatcttcttagcatctcccatgatgtctaagttgtttcaaaacaaaaccaaaaaccccacttggcccagaagagcaaagattaaaagccagcctcgaggatccccagcttggctacctgcagctcacagcatattggaaaaattttatgaatcggtgaactttttcattctcaaatgggctcttcagatggtttattaattctgttagatgcgggggtgcgtctggctttattctgtgtggaatttttggatgaattcactgcctcaccccctcccctccacaggccagatggggagccgggtgctgtataaatgtttaattgtggctcagtaaaaatatttgctttcagtagctggaagctaccaaacggaggtagcgctgtctactagagttgccagacttcattctaatgagaacagaaataaaggctgattaaatcaaattccccatagtgtagaaccacttaaataaatgtttcatattgtttgcatgatgattttaaaatgtaacagctgcttatgtaaccattaggctggacataaatcattcatcgccatcactgccgtcaaagcagcactggctctttttcttctgctgctgacatttccattactagggagcttctcagacatgctcttgggttccctgtccttacccaagtgcggggtagcaggagactgagggagggatgaggaatgaagagcaggcacgaagctgccatttatcgaaggcctactttgcacatgtcccattgggctggcattgtcacatttcatccttcccacaaggaggcattactgttcccattttatagatagggatgctgaggcctatggaaatgaagtgagctgcccccagagtagggaatacagcctgtatgtgaactcaggtgtgtctgagccttggcaactcacacaaggctgcccgagaacaaagggtgcatcccaccccgaggctccacacacctcaggccttttagcaatgatgagagcagtgaagaccagaccaagactcagaaaactgcagaatcctttcggctggggctaggggtggggcagggtagatactgatccaaaggatttggactccttttcctagtccaaatccccatcgtctctcccctgttcactgtgtcagcctcctgactcccctgcctccattcttgcccatctcaatccatcattcacccagtagcctgagcgatcttttaaaagtagaagtcagattatgtcattctcctgctcaaaagcctccaatggcatcccaccactcttagaataaagcccaacctcccaccatggccctcaaggccttttatgatatggcccctgccaacatttgctcattcgttcctaccccactcctttatctgggcgtcttggcttctttctggtcttcagacacaataagctcatgcctacctaagggcctttgcacatgctggaaccatcctcctcagacccttcccatgactagcttcaacctgtcattcagacctcagctccaagtcacttcctcagaaaggccctccctgtaccctggattgaaaacagccctcccctgcacacgctccacaccatagctctgtttcatttactttacagcactgaacactgtctctatttcttatttgctattttcctatcccactataatgtaagctccatgacagatatctgggcggttctccactgcttccccagccctagaatgctgactgtaatgtagtaagtgttcaataactattacttaaataaatgaattaacttgtctcattcttttcccctgcatccaagttgggtgaaccctgacctggccccttgaaagagacaatttgattctgaaaaccaattcttacctccaggctcaggccccatgcaggagtctttctccaggtggcctggccatgcaggtgatggcagtcatggggggaggcagagagctgctggagaaaagctaggaggccctttggggttccctgtattcataggaaggaggatcccttggatccatgcccccaactctgcaaagctgagtctaaaggatacacagaacacaagacatccttctgttgccaccaaagcttctgacaccccattttggctggagagagacttgggcacagttcttgaattggctgcaactccaccctccctcctgcaagtgcctcttcctctgccacggaagcctctgtgccatgaagaagaccaccagacctctccaggtgagggctctgggtgtcagtcccctacgccctagcaagatctggaaggcaggagccaccttcctgcaggcaggcaaggtcctggaaatataaggttgtctgtggccattgaccatcctactgcttcctggtgacagaaaatgttgcattggtggcagccatggggacagcttcctggttcctgaattgcagcactggtccgtggcatgctctaggactcaggcattttctcagcagcttttgaggtagtggccccgggcaggtcagtttggcagtgtgctggggattattcctggaggcccagcctggtggccgcttctccagcccttccagtgatttggaagcggctggttccttgcagtaagtcccttcttcctcgaaccactgactgatgcagagctcctccatggtagggactggttctcttaggcccctgtatcctcaggcccagcatgcttgggaaaatgtttgctaatgctttgtgactcaaaaggaatcacacacacacacacacacacacacaaacacacacacacagtttttaatattatcagtcatatcagccccctgaggcagctgctctgttccagacaaaccctgttaataacattcttatcctctttgtttcattttccagctcaatttggaagcctgaccttgtcttgctttgcctcctactgagagttaatactgggacatactgaagggcgaaggcttgagtcacaaagtcacagggataaatcctagatccagcagttactgtctacatgacactaagcagattagttgccactgggactcagttttaccagtctgcaaaatggagctatcagccgcatctagcactaggggcgctgtgagcatggagggcagtctgcacacagaggcttaacacagtgcctgagcttgcaggtgcttggtaaatggcaattgctgtcagcattgtctgatttacctgaaggaacagttcacactccacccagattttcactgcagcagccaagaaagaacttctgggaaagcatctgcttccacccaactcccaagaggggttcgtagagggtggagctgagagcccgcctcccctaccagcctgcagaaagaaagccatgttttggcctcagggaggagaaacccagataaaaaccaccccatgtgcagcctttgcgtggccacaggaccagctccacagggagagggaagaggcgcggccgcaggaccagctccacagggagagggaagaggcctcctttcaggggtggggagctgagggcaagacagaccttttctgactcagcccaaggagggctggagcaggggctgcaggttccctgctttctgctacaacacagggtaggggagagtcatggcctcccagagcctctgcaggttcacctgccaaatggaaataatagcatcctcctctgcaagtcacagccttaaagaggtgctgagagtcactagttagacccaagccagctgtttctggtgcattaggactatcgaccagaacccctgcattcccagcccctcctgcggcctccaacgaccaggagagaaaggcgtaaggtgtaagactctgggccaggttctggcagcttatggccactcttttcttgtgtctggacaggagcattatagctacaaccatctcatctaatcctcactgctgccctatgaggcgggcattcttatttccccagttttgagataggcacagaaaggggaagcgacttcccaggttcacattgccagtaagtggtaggactaggccctgaaaagcacagcctgccatggggaagagaattcatccccagctgagaaccactgtatcctcacccaggggttcccagccaatgcaaacagggacgtgaccagtctccactggtcccctgtaccaggtctccaccttgccggcctgctgctgggccccaggactgctcccaggctgcacctgtggggtctgccacctcctccacttccttttgagaagctgctcccaccccttcgccttcatctcaaaggaaagtgtgctgccaggcagctggagccagatggcccagagacaactcttcccatcacacttcctgcagcatctgagtccaacccccaactccagagctggcaagctgcccagagcctcccagaggaggcctatgggttaacttcacatttagtattttcagcatatggtagaaagaaaatagtgttgttagatgtacaagtgtgatttcccctttccagaatgccttcctctctcctccacgtggtgagctcctattcatacttcaaaaccatgctcaactattccctgcccacctgtttccttccactcctccccttctaatgtgggtgtgtcccagggacaacatctgtgttcctcagtgaagttgagagaagcctaaatttgctctacataagaaaaaagaataaggaggtaaactggaaacgggaggaggctgggaaacgcagggttggtggaaggacttgtggggatgtcgtggcagccacctgagggtaaggaacgtgacagccagagcagctatgcttaaggggctttgccacagtgcgaaagataggatacaaggtcctcttcagtctctccatgaaaaccacagtcaaagtacacattactcacccatgctttggagctagatttgggcttaatgctgtctttttttttttttattaaaacaatattccaggctgatggaatttaacaacaaggaacataatatctgacacaaacatagcctaagccttgatatttatcatcttatatagcaagagatcagggtgttgagaactttagagcagctccgttatgtccaggctctgggcggtttctgggattctgtctgctgtcccatcagtactcacggggtggctgtgtctgctacagacatcatagcctcacgaaaccacctacactaaagccaataggaagaaaggtgtgtgtcaccttcaccttcccaccctttatgggggaggaaaatatttgccaagtgacccacctttcccttctcaatgcccctttgatcaaagcctggttctatgtccctgcccagctgcgggtggtgctaggaaagaaggtatctggggtttgacagtctgctgtgagggctaaataaaaagggcgtgagaggtctgccctctgcttgtactcctctgctgagggagaacttgctgcttctggataccaccctttcccatcgtatgatagcctgaagtgttcagaacttttcccattaaatcacttgaacccgggaggcagaggttgcggtgagccgagatcgcgccactgcactgcagcctgggcaacagactgagactctgtctcaaaaaacaacaaacaaaattgactttctcccactgagcccaaggtgctttcctggtaacttctctttgacccagtcctgcctcctgcatcttccttcagcaaccctgttctccacatcagccaccagagggaacatcttaaaacacagggctagactgggcatgccgttgtctctgctaaacccctcactgagtccccagtgtctacaggataaaatccaagcttcacggcattggaggctcaccacagtcctacttcagcctagtctctcttccttattcttcccctacatatatatgtatatatatatatattctcatactgtaggtgaagcaactgaaatgctttttattcccctgacactttttgtttttcaaattcttgttgtacaaatttatgggggacatctgcagttttgtcacatgcatagattttgtagtagtgaagtcagggcttttagggtatccgtccccacaatgacgtatattgtacccatcaactaatttctcatcatccactcctcccccacaccctcacccttccaagcctccattgtctattatcccactctctacatccatgtatacaggttatttatctcccatttatgggtgggaacatgtgatatttgactttcttcacctggcttgtttcacttaagataatgaattccagtttcattccagttgctgcaaaagacgcctcacagaattttaaatgcttatatatatacatacaccccctttgtatttgcctacacaaaactaacaaacctttgtgaaatgtaacctacaggaaatatgatcatgtctaatgctggacatgaagcagatgcaatacacaaatccatgaggtagacccaggtatttcagatcctgaccttgatctcaggtttacttattagaccacagaccaaagactcccactgatgtccccacagatttcaccacttattcctcttgtcccacacactctactccaaagtcaccctcctctagaggatagtcacctgagatacttcagcgaccctgctcaccttggaaaatcaggtgacaggaatcatcagttaagcctgtggacagtaagcatctgttggtctggatggtgtggtgggcggaaggtaggacccaataggggcttttcatggttccagccccaaacctctgaccatgccagtgcatgctgaaggcccccattccatttatggtcggggccacatgatttacatttactgtctcaggttcttcttgtaacactgtcttctccaatttttgataagccaatgcccctgacacttctatgttttgttcaaattgttctacttgcccagcattctcttccaccttctccagctgtcaaactcctacacacccttcaaagcccagctcatgggtcctctccctgacaatgattccagctgaaggagatgacattgctacttccttggctcctatcatacccggtatggctagtgtagcacttaacattgcttggtgcttggtgacattcccaaacgttcatctgtcctcaaggatgggaacgtcctcatttcccatcatttaggaagtgcttgctaaaccaaagactcagcccctcatcaggaaccagtgaaggacagagctgggaaagagttgtcatgggcatggggactatgtgaggtcatacgcagttcctgggtcacagaggtgacccacgaatggtagctgcagcgttgattgttgcccctactattactgtgttattactgatctcagcccttctcttaagtgaccccttcactagtctcatagatgagcggccagcctgcctcctggatcccagaatttgctcactgtccacgacttcctgtcatggctgggaacattcaggcaggatctggtcccactcgtaggaggggaagacaaagagtgccatccctccaggccctcccctcctgcaggacagatcatcctgcctcactccatctgcagatgctggcaaagcacattccagccctcgcctctgaggcagagaaacagattccaattaagggacttgcggaaagtggcttcattttacaagcaattgggttgtgaattgaagcgggcattaaagtttacaagctaggctggcggaggagccagaaggccttgctgccactgcctgtcaggagacatcttctccagttactcaacaattgtgtggagtgagtgaggagtcggcacgaatcctgccctccatggctgatggtggaagaaatgtccattcattcgtcttcttaaaaccaaggatcaggctgctggagggcacaggatcatctctctcctgataggctttccccttctctagccttatgtgagaatctgggggattttaggtggtggtgagaaaatggggaaagaaatcacattcgttgacctctgcttacagctgggatccccacgcagctgagaaatttccaggaaattacctgggttcaatggaggaacttaacacttcaagctgtcacctggtgggaaagggtggtggcaagaagtaacaagatctcccaaatggatccaaccagagagaaggcctcctcatttccttctcagccaagcccacgggggccctggaagacagaggttgccggggcatccagggtctacacgggctgagctccccagacctggtgcaagggggccaggcattcccgccaaggctctgccacctacccagcaggacccatgagctcagcacctttctggacttgaggagatgggtctggttttggccttttccctccagacttccttctgtctctgcctctccactgacacctgcctctgctgtcccccaggacattccactctcttctctaaggctcaggcctgaggggttgctggtgggcagattccatctcatggttgagctgtttggcctcaatggcattttatctctctctctctctgtgtctctctctttctctttttttttttttcacattgagccatcttcttacagctgaggttttcatataaaaaagcaagttgctggtttctctttaaaagtagggcaatctggcagttctgggcttgtgtaaaaacaattcggtagagctaaaaacaggggcttctgataaagcctgagctcccagcagccaaaggacttatcaccccacaaaaaaatcccttcctgcactcatttatatcaacccctgcccctgcagacacgtattgtaggttttaactagaaacaagaggattagctttatttaaacagcaaaactgcttaaatgagataatatatgtattgggaatggtgcctggcacctaacctaatccttagttaattaatatttattgagcaaatcatcttgattattaaaaagacaggccagctggacacaataagaatgctagctcagagctggcacttgagggttcggtagaatattcatggcttggaggtgggggctatgatacgagcccatataatcagagaagttcagatgggaaatgagaaccacttggtagcctaaattcagagaaactaaagccagcctaacgctctgaagctggcaagtgttcatttttggaaatcagaaagtgatgatgtgttatcccaagagactcctgggacaagatgcagtgagcagccattcacaaagactaccttgaaccgggctctttccctacattttgttattatatcctcgctacaaccttctgaggtggaaattaatatccccattttacagatgcataaactgtctagtgagggtgacagatagtattgacatgaccagaagaataaatataaatgagataaattctctctgaaggaaaggaatagggatttacaatggtgtaaaacaaaggaagtggggcctggtctaagcgatcagggaatgtctctttaaagaagtgacatttaagctgaggtctaaaggattagatgagtgttaaataggaggagactgggcaggagggaaatcttctccatggctctcaatccagacacacaatttgaaccacctgaggttcacaaacacaaagaaagtatcgtgacctgatacagtcccagtctaattaaatcagtagaacccaggtgccgatgtttttgtttctttttattttatttattactattttttgagatggagtctcgctctgtcacccaggctggagtacagtggcacaatcttggctcactgcaacccctgcctcctgggttcgggcgattctcctgcctcagtctcctgagtagctgggattacaggcgcccaacatcacacctggctaattattctatttttagtagagatgggatttcaccatgttggtcaggctggtctcggacccctgacctcagatgatccgcccgcctcggcaccccaaagtgctgggattataggcatgagccactgtacctggctggtaccaatgtttttaaaagctttatggttgaaccactgaaatgaaacaaaaagtaaatccaaagctcatatactctagccaaacaatagccattaatagctattaagtaaatagaggagatgctcagtgataatgagcaggtagatcatcagcatccttgtcatcaccactacatctgcctcctccagatcatttggtagccaagtccaatgtcaaaggaataaaggaaatctgcctctgttgagggcttgctgtatgtcacgcactatgctaaattcttcactgtttcatttaacgtttaccgaaacccttattattttacaaatgaggacgttgaggctcagaacaaggcaccaatttacccaggatttcacagctcatcggggcagtgggggaccctcttccaggcccacctggctgtagagaccacactctttcctgtctccatgcagaggggcctcctgctcactttagctcccatttcccagcctgactgccttgattgggccgcatttctttgttctgacctcaaaaagagttttgtagatttgtgcccacttttctcatcacgcttaagaaaagtgaccaaagctgaaccaagctatctaggttcaaatgctgcttactggctatcgggccccaaactatctgtggaacttctttgagcctcaattttttgttttctataacatgggaataatatcagtacctccctcataagtttcttatgaagattaagtatgtatgtgttaagattcatattaagtgagaattacgcatgtacgcatatacatacaagattaagtatgtatgtaagcatatatatatacacacacatttagaatagagcatgaaatatagccagtgttcagttaatgtcaagtattgttaatattatcctatgggctggagtgagaggcctcctggggtgtttgctttccagcccccaatcgggtggcatcctggatagggtatcatcatacctctccccaggagatcaggatagggaattgtaagagcactcaggttggaggtaggatgtgcaccagggaagctcaggcaggaagctgctgtctttcctggtctctgcagactaggagcagcagccagggacctgggttgactgggggacgggtcggtgggtggggtgagatgactatcacacctcctctaaaaacaagatggggcctggtgcgctggctcatgtctgtaatcccagcactttgggaggccgaggcggatggatcagttgaggtcaggagtttgagaccagcctggtcaacatggtgaaaccccatctctacttaaaatacaaaaatcagccgggcgtggtggcacgagcctgtaatcccagctactcgggaggctgaggcaggagaatcacttgaacccaggaaggggaggttgcagtgagccaaggtcgtgccactgaactccagcctgggcgacagagcgagactccatctcaatccatctatcagtaaaatacaggatggaagggaacgcccagctctcagtcagctgccagcccacggccttggacgccactgatgtgagcctgtctgggctggggcagaaggggccagcgtcaggtcctcagacaatttcctcctggtagcctggcctgaggcccacccaacccagggagccggccctggccagttgcagccagtaccacctggtgcccagcagagggcagcacaggccacaggctggctttttctaggtgaaattttgctacaacgtgtagcctcttgggttcggtgtctcccctgtacttctttgcaggccggagaagtcccggacattatcacagacaccctgcctcatccccagcttctgaggtctttctggactctgttagcatatttcagaggttcactgcaaaccagaaacgggactttgagcttgtgttccagggcagagggccccagcgcctgtaggtgcagacagcgcacccccaacacccccgagtttccgcctcctcatctggagagcggggctggacaggatggtttttggggcttttttgcaagctcaccggggccaagtgagctatttccccttgccattctctcccaggaggagaaggcataagatgatgctgaaggcacaggctctggaagaggacagggccatgcttattcctgccttgttatgtgattatggacaagccttcactgacccttggagtgatggataaaatccgtaccccacagggttacaggagaagtaagtgagggaccacgtgcacggagcccagcaaggtgctcaggaaacaatgctattgtttttcaggttacatcttggggagaccacccagaggaccttctttcaaggacaggtacctggaatttctctccctttcctacatcatcttcttgttttcatgcgcagggaggccaccactacctgagccagaccactcccttcttaagccagggcctgcaaattgctgcagcactgccccctcgatctcaatcagacacccacattcctgcccaccatgcccaaagcccttcattgaccaagaccctggcctcgtcccaatcctctgtaaagtacacatgcgtcttcaatccaccctacaggactgtggagccgagaagatgtggggctgagcatttacctttccataagttctccagggggttctgaggcccacagaatcaaagagccactgctctaggcaatgagatagtattctaaaacaattaatgaaggcccatgatggggacaggagagccattatgcaaattccggccattcgaggttattaatttgcaggagagactgtagacgctgggtaaagaatgcccacaatattaggcagtcaggaggctaccctgcagggcctgttcctgctccgcctggtgagcagaaaggtctcagggaccagctttaaaggatgacaggcctcccactgggtcacagggcacagctgccaggactgaggccagaatgaaggcgatcgcccatccggctcagtggttctcagtcttgggtcagcactggaatccccaggagggaacacggaaaccccgagagctggctccgcccctagagctgacctcagtaaatctgagatgaggccagagaaattgcatttcgacaagttcccaggtgttgcagcgcaggtgtgtgcatgcatgcatgcatgtgtacttgtgtctgtgcccgtgcatgtgtgtgttcccctgttttctgctttctgcagtgttttagctcagacttcctgattggggtcccattcttgaccagaggcccagtctagacctagaagaatactaatacatgcccagctgtttagagcccacaagccctctcatggcccttgtttccaggccccataacagccccataagtttgttttaaaagtgcatctgtaggggagaaaagatttctttcctcatccatcactaggttcatggctgaggcacctgtaacaaaagacagactcacaagagaaaagcaaccaagtaatttaagttttgtgtgacatgggagccttgagaaatgaagacccaaagaaacagggacatctatgtgattttttgccaagtttgatgaagaagcagataattgtggagaagtataatcggaaaatgggggtatgatttgatggtaatgacctaagtggcatttggaaggcctgtttcttcagattcttctctgcgtctctgcatcttcatagagaaggactttccttccctgtgggtctagggaaggcacctcttaaatgaaggtttcatgacccacttgagaataaattcaggaaattcttttatggcctgcttcaggggagaagggcaggagaaggtcagagagcgaccttccttcttctgtggttttctcaaatgccaaggtggcagatctgggacagtgtgtcctgaactccctcacaaccatggctgtctgcaggccagtcactcaacggccatgaatgtgtattgacttgtgagatcctccaaacaaaccttcaaatctctgctcacccccatttgagagaccagagatgagccaagagacatgaagcaaccttcccaagggagcagagccaagatttgaaccagggctgttgggccagtgagcaagggcttgaaatccagtgcagcacaggtatcttcctcagcaggctcagagacaggaggtggaccggccggagcagaacggaccctccccttcaaagcgggactctgcccttgagccctgagcagccactctggacagggtccacagaggaaggcaatcctccagcccgccatgcttcctctgacctcttccctctctcagatggaactgcaagaagatcccaaaccatccaggtttcccctacctctgggcctttgcacagccttcagagcagccctgaggtgatctcctgggccatcagcacatgaccgaacaaaccttgggccaccaagctccttccccggagttggctctgaggccaatcccccgatttcacaccattttaccattcctagccttggtccctccacagagccccctgtttgctccccgctgtgcttcctggcaccagcctcagtatttccagaaacacatgcagagactcaaggcttggaggactggctttatcgagaggctctggaaggctctctgaccccagtggaatttggctctctccgtccctccagatgttactcaggccccaaaccttgcccagccttgttagtggcttctccttcccacacaggctgtgccaccccttctccctcagcctggaccccagaccagtactgagcttttcctgtcagccccttgggtcactgcagacaaggctctagtgttcaaactctggcttgagctcagagcagggcccactctgggcttgaaaatacctcgtgtggggacagcagggcacactggagaggtgaggagggtctcctgtcctaggctgaggagctggcccagaggcagccctggcctcctcgccactcccctgaaatcaattcctcatctgagggagctttctaaaataaaatttaaaaattgcccacggacctgcccagcttaaagcctttgcaaggctgctcttgaccccagcatgaaacccaagctcctctccatcctggctgccaaggccccaagccactcgcccagcccaccagcctcaccacactcccatagacttccccactcttgggtgggggtgggagggctacacgaagctctaaagtcagcccgtgctctttctcacccccaagccattgcacagcctgctcccttggtctagaacactccctgtatctgacttcgacatgtttcttcctccaggaagccctccctgatgccccattccccctccaaggactgcccagcatctggagcaccctgtaccgagcggcacactgtggtgctggaaacatccttgttgtactcctctgtgcctggacactgcatgtgggcctgtccatacgccacccagacccctcgggtacctttcaccatttctgagcactcttcccctggcttctgtgtgtttttgcttctaagaatctgttgggaagaaaatattccctctctatcaacttagatcctagtggtagggtggagggctacaaatcaactgacaatggacagattcacaggagaaaaaaacaatcagttgtactcacatgcctggggaagactgaacagctgggaataagggcttctatacccacttaataaaccgggtgaactgaatggggttagggctgctgtggaggcccaggaatcaatcagaagccttcagctttcacctcccatcccccgttccctgaccccatgccaccagatgcaaataagaaggaaactttaattccacaaattgaagcatttatgaagctcagcaggcaacctggcaggcaggcaggcacaagtgaggaacaagggccccgggctgggctgccttccaggcaggtcccctcgacacaggccactgcagctctctcctgcaatgtgtcaggagagcctggcacaatgtgggggacgggggcgggggggtgcggagcttggcaccacctggtggtctcagctgccactccacacgtaggaggctggatgcctgctggggcagaaggcggaatccagcctgaccacttagtggggctcatctacgcaagccttgggagcagtggcaggctgctgtgaggggcgcgctagcctgaggaaccctcagcctcagtactcctgggtcgagctgcaggagcaggcctggcaagtccctaaggcttccagcaacattccccttccccaggcttggcagtgccagcccacaactcagtcatgggacaccaggtgggctcctttcttgtgggcctggggcagtctgctgagaagaagtgggcttgcagccttgagggggattagatcctggaggagaggcccatcccttccttcatacaaccggggtatggctggctgtccacaggcggccatccccgtgccacaggctgagttctgtcttccccaaactcacgtgctgaaggcaggaccttgcaatgggactgttcttggagacagggcctttaaaggggtaactacattaaagtgaggtcattaggttgggccctcatcccatgtgacttgtatcttcatgcgaagagaataagacatagacacacacacaaaggtaagaccacgtgaagacacggagaaggcggcgtctgcaaaccaaggagagaggcctcaggggaaaccaacctgctgacaccttcatctcagacttccgggctccagcactggaagaaaatgaatttttgtttaagccgcccagtctgtggcaccttattatatcagcctgagcaaaccaatacacaagggcccagatacctaaacagaaaagtgtgataaggccatttaaaccacaaatacacagcgggggtcccagatcccagagcagggtctcagttatttcacagatcacaaaactgaggatgctgaggaagggggcctccccaaggccacacaacaacttggaggaaacacggaactgaaggaaattgattcccaggggagggcccttgcctgaccccctcctaggggagagtcagagggtttccaggagcatgaggatgctgagactacaggactacagatggagggtgtttcatggctgagtgaaggggtagaagccaggcgagtatgacacaggatccctcttgacagaattagaacacagagatctggagttcccatcatgcccctaccacagattcatggtggaaacttgggcctcatctgcttatctctgaagtgcagaaatttatagcacctacctccagggagagttgggggttaactgagatcacgatgtacaaacctgtaagctgtaaggcaatggaaaagtggagggtatgtccttggatgaagcttccgctctggacagcatggaggacccaggagtcaggctgggctgctggctcacaggtgttctctccccctggcccaatgccctggttcccattgccgtctgagctcctcccttccatgtctctgttcttgcttccttccctcggtctgccgtcgccctttgtcagtgatcagacgtgaccatgggtaacaggcatgaattttagtctctgcatgctcaggtgtgtaagaaacatggcttcctttagttcctataactaaactttattttcagtttgcactgatcttcctccagctgccctcccagcccagcagggcctctgccctggcagggatgggatcagaactcaaagcccctttcatgcaaccgtgtgtgcacagttacacacagatctgtctaaaatctaactagtaggaagcagtgagaacttggtgctttgtagagaggctttgtgattcagataacagggctagctccagggagtgtggaacaaacgagacccctgagggcacagacacctcagagcatttgtacctctggtgctggggaggggtggggggcccatctgtgagcctctggtgcccatgtgcccacgtgcagggtttgtatctttgtgcactttgtacctctgtgtggcaggcgatcaatggtgtttctatctcagccagggactcaggtgcgagactgagaagcccaggaggcaagaggcacctgcagccctagagcccactgcagattttccttgagggccgtatatccagaaccatcccagggcttggcttttgagagaaaatgtagtcttaaagaatgaacaagtgggccgggcgccgtggctcacgcctgtaatcccagcactttgggaggtcacgaggtcagaagatggagaccatcctggccaacacagtgaagccccgtctgtactaaaaatacaaaaaaactagctgggcatggtggcgggcacctgtagtcctagctactcgggaggctgaggcaggagaatggcgtgaacccaggaggccgagcttgcagtgagccaagatcgtgccactgcactccagcctgggtgacagagcgagactccatctcaaaaaaaaaaaaaaaaaaaaaaaagaatgaacaactgctgactactgtttactacaataagcatagctgatactctatccaggaagaggaagccaccactcagtgccccagccaagattgttctcaagcttttgtccgtcccaaacctttatgaagcatcctcacccactgacatgtgcagtacttaagacggtgcaccctggagtcaaatcccagcttggccccacatgagctctgaggcccttgaggagacagcgttgcaaagaccccaggggccgagtaagcagaggcctttcagagatcagagaaaaggccacatagctgggagcctttgtgaaactggagaggtcatcggggccagatcctcaggggcccagtggccctggaaaggaatctggtcttgtacctagaaatggtggcattaattatgtgactttgtccaagtcgctgtcctattctgagcttcagttttcttgtctgcaaagggctctggaccaaaccatctaggatccaccctgaccctgggccttcatgtcaggttaaggagagacagggcctcgttctgcgttcaggatgagtttctccagggaaaggccttctagctccgccctgccctgtctggctctggggaccacgcaggactctcaagacactaggtcactacactcaggagtttcccatttctgccaagacaatctggagaagacatcaccccacttgagtcatgagatgtcctcaacagcaccttctagagtgcagatctttttgctgctgtgagagaggggcttatgcagaatgatattgtcagtgtagacatgtttcacacagaggagaactcaggacaggggacaggaatggaggcaggaactcgatctattagaacaagttttctgatgtggttatgcatcagggatgtagaatcctgtgccttcaggatttctgggattaaagacaatcccagaaaacaggcctggacaggtcctggaatcagccccaggcctatttggataggggattctggggtcctcgtacccagagcctggtctagacagaaggagggagtgggctctgggtgggcaaacccaccttggccctttcccttccctcatcctgtggggaggggctcagctagtggagggtcagagagggtctaaagcaggggttccatggtaggcacccctcttgtccagacccaaaggtggcttggatcaccaccgaggcacagctgagtgataagttgatgagcagctgtgttttgctgccacataaaaatggctcattccccaccccccggccctgaagtgactatttactgagagaggcaaccctactgaacaaaagcctgctatttattacacgttcggtgaacaccccacagttccaatgcatggggagggcttggaaaccaaatcaaccttgggaaaaggaggtgcagaggccaaggtcaaaaccaattcatggaagtgggaagaaagcagggctggcctcaaccttttcactattagagagatggccatgtaaagtagtgagcctcctgtggaaggcatatgcaagaacaggtagaatgattatttcttaggggttttgtagaaaggattccttacacacaaaggcacaggattctacatccctggagcataactacatcagaaaacttgttgtaatagattgagttcctgccaccactcctgtcctcgtcctgagttctcctctgtgtgaaacatgtctagactgacaatgtcattctgcataagcccctctttcacagcagcaaaaagatctgcaccctagaaggtgctgttgaggacatctcatgatgcaaatgaagcagctgcttgcaggagccatggaggggcttgggcagcaggcggggggtgcccacaggcatgtgcccctccagaaatgggcaggaagtggaaggaagagaaagggagtcaggcccagggcaggggtgggggctggggtctgctttctccacactgccaggttctggtgaggacctcccaggtgggtgtaaatttgcaaacccaaatggttaagaagatatatctgttaatgtagaacattttgtatttaaccagtaattgacttgattcataactttaagtatgcagatgtggtaagtggacctcagtattagcttcctattgccactggaacaaatgaccagaaacttcgtggcttcaaacaacacacctttattatctgacatttctgggggtcagaaatccaaaatgactctccctgggctggatccgggtgttggcagagctgcgttccttctggggtcctgggggaagcctgtttccttgccttttccagtgtctagaggctgaccccattctttggctcatggcctcttcctccgtcttcaaagccagcagtgttgggccgagtctttctcaggctgctacctctgttctctctctcgtgcctccctatgtcatttgtcaagacccagaggattccacaggcctacccagataacccggggtaatcttcccactttaaagccagctgattgacaaccttaatcccatccacaacctctgtgaccctctgccatgcaaggtaacatactcacaggcatagggatgaggatgcggatgtctttagagggccactgttttgcctaccacagcttccatttggattcttgtcccaacccctacaaaagtgaggcatataatttgttgaattctgaataaaatgctaccagtgtctacaaattatattttttctttttttaaaaaaaaaaaaaaaccttcttccccaagtctggtttcctttagacctcaggactaagtacctgagaagatctgcgggcaaggatagttatgtgattatctggacagaatggcatttctgattgacattgttgcattactttggctccagatgcagtggcctgagagcagaaataaaaccccctccagctgcctcagcccaccctttgcagagggagaattgagttggggccacacggtgggaagcactaatcctcagtccacacaaaccctcgctttccaattattttgatggaagtcatgaaagagcactcagctaggcattattaatccattttttcaattcagcaagtattgattgagcagctaccctgtgccagtgaggttggaaacacaagggtgatgaacaaggtacatgtgcctggccgtcactggccagctctgtcactgcaggcgggaactttccttcctgtggggcccagggttttataatcacatgagcacctacacatccggtacagagccccgttaagggggcagggcctggcctgcctccttcactgttgtctccaattgcctcagatgcatgtggatgctcattcgttgaatgaatgaatgaatagatggtccttgctgatcggagagtcaatgactgtatcaggccaactggaaaagcagagggcaagccaagagaagacttggacagtgcctgccaccatggctgcgagtgagaggactgcggatcccgaggtggattcctggggtggcagctactgtttacaaagcactttgctggtatttattaggccacgcagttcccttccaagtttcctcctgttatcattctcactttgcaaatgaagaaactgaggtactgggataaaacttgctgaagaccacatggctagtaagtgtcagagcttggatgtgaacctgaatgctcgctgaggagagagcagctcgcctccttccctcacaggcacatagtcagccttcccgaatttcatccggcaacaattaacctctcccttctcactatcccccgctccctttccatctgtagagatctccttggatctaaattatcagggcctaaagccaggccatactaccgaggttaaagaaggtgaaagggctgcattgggcaacattgttccttcaatcctaactctttaatcctaattcatcactgcacactctgctcccttccctgggtgaagacagtttgatttgcccagtatccagaaagtttgtgctaagacaagggaaattgccacatggctctctgtttcattcagtccttcataagcatgcagcctgacctggagaaactgacagtgtaaaatgcatggagcagctcctgtccctctctttcctacccttgagcactctctaagcagtagctggccgatacagtcgcccaggaagtctccctgtagctcggccgtcagtcattaccctcactggcagcacgggacagagaacgggatatgttctccccttttattttgtgtggtgagacttggaaaactctgcgcctagaaaaatccatttctgaaggttgctgctattgagtagtgcagtgagactgggtttgaaggtattggactcttacataggctatgtgaacgtgggcaaattgcatcttctctttgagaagtctgagctcaagtcttgctttgagttatttgtgtactaacctttgaccttgctgacaaaaaaaaaaaaaatcacagtgctgggtacagctcctgacactccacctcccctacttcttttttagatacagggtcttgctctgttgcccaggctaaagtacattggtgcaatcatagctcactgcagccttgaacttctgcctcaaacaatcctcccacctcagcctcacgagtaggtgggactacaggtgtactagtatgcccagctatttttatttatttattttgctgtccatcctgatctggaactcctgggctcaagcaatcctcctgcctcggcctcccaaaatgctgggattacaggcatgaggcactgcacccagcctcaacttctcccacttctatcttctccccagttctaggtgaggcaggacctgccacatgtccaaatctccatctgtccccagcactctactaaatggcttaactgggccctcacgtccctccctggggatcctgtgaaaagacttgtgaacctgctccaggtcctgactgaaccaaatttcctctctctacatgccgaaagagtaataggtgttcctgcattaagcaatggcttaatttaggtttattttcattcttcagatatctctcccatttgatgtttcacccccttgaagctcaggtgaatctccatcttcttattcatctgaatattcctcatgcctggcatcacgcctcactcatagagtaggaattcaaaaacatcccagtaggagctgggaaagctcctactgcatgtcttgtacatctgctgtatgccagctgggaaagctcctactgcaagagagaggcaaaccacaaaggggactaaggggaagaattgggaggggggcatttattgccccaaatgactgaatttgggtcaaataacaggaccacgggcactcacatgttcaagttatgttcaggaatcttcctgttttctttatgaagcagaccctacctctcatcataaagctggaaatgccacgttccctccattccagcctctcttgcagctatggtgagcctaaatgagctagactcagtcaatcaaacccttctgccctagagtttgaatgggaagttctgacttgaagaattaggaaccacacaggaccccgtttgtgaagggggtggcacaaggtgcgtggcctctagctcccaggggcagcatccagaattcagcctcagggatgttggtcatgcaagccaccaaatcagtgccagcagccaagacgggggtgtcttcacagggccagtttcgtcatgttatttcaagggttgctcctggcccgtagcctctgaatttattttagtttctcagagatttcagtgggccaacgaatgtcacttaatcgatcccttttctgcttggaggagccagactccgtgtttgttgcttacaaatgagaccttgactgagacaagttgtcttgagtttccagttgaagtcatcctattccctttcaccttgaggcctttgcacatgtcatttctctcacctggagcaggcattcaccctctttttgtgactggatgactcctacccagtcatccaagggtcaggcttgaagactcttcccctgagaagccctcccagatcaccccaaatctgggctcccacaccaccctgcatgttcctcttagtagcatcctgaccctggattttactgtttatttctgtgtttcctcactattctgtgagctgcatgaggacagaagtgcatctatttcatcattgttagtagtagttagtatagttgcccagcctattgatattgttgaatgagtggatggattgaactctcttaggccagagtgatcccccactatcactgcctggcagcatggagcagcttcagtttttggactcagggcaattgccctgttccaggaaaccccaaaatagagttgcctcatttcacttctaccagcatgtcttgtacatctgctgtacgccaggccccgtgtcctcttacgcccacatcccagatcctgcaggtagaagtgctcacattgctgtgctcccttttctctgaccagccatggaggccctgggggcttggaggagtggctgcttactccctgggggaagtgtgggctgcaagccccttgagtgggcaggttgccatggtgatgctaatggagagacttgcctgaggaatactgaccaccaaaaggaacaattaccagagaaggcccatttctttagcaattttcaagaatgggcaagataaaaagccacaagtgaaaaggcattgcaaacaaataatagtgtatgagctggtctggacccaacaaggcctgtttcccacccctctttccctctggttgtagtgaataaagccatacttttcagtgatttataactgttcaaaaatgactcgtttccatatcttctttcatctacccagcacccattatgtaccaaatgcctaacagacacttaaaatatactctataattatgaaaacaaccctacaaggtaattgttcccgtattacagatgagaacactgaggctcagggagtgtaagggacccgtctagggctacgcagctgggaagcacatgcagcactctacttcatgcttaattcaaggaagcgaattctccttgtgggttaacatcatcacagtggcaattccagtgcctccataagaaagtgtccttggaaatgagacactagccctctcctgtctcatctgcacaatatcctattgccatctatttagaagagaggtagtgagttggttcattcattcattctccatttgttcattcatacacatttattacactcaaacttctagggcaaaaccagcaagccccgtactggacacttcagactcaaagatagcaacttgctaagttacaggagcttcctcataattgctgagcttctaagctctttgtcccaactcctgaaaagtagccctcaacttccaaactgtgcttcgggcactgacattccctgagctccacacacccttggaccacagttttctgaggcccagatgagcacaatgtgcagggcagagcctggcacttccagggctccaaggagtccagaggaaaatcgggcaggtcctgaatcaggctgctgtaggttgaactcctgccccacttagcagctggatgatgtgcaaattgctcagcctctctgtgcttcagtttcctcacctataacctagggctaaaaattagaagcacctactccatacagctattgtgctgatacaatacaataatccacataaggaacttagaacagaacagtgccggcggtgtatgttaaatgctgagtggacaccagttgggattagaagtagcagcattgccaggtactcctgagcaatgggtcagctaattccactctaccctcagaccccaccctcctttgcagttccttctcctgctttgataactagaagcagtcatatagggcctggggtctctacttgtaggagttcagtcagggtggtaggaaaaattataaaaattatagaaagactcaaaccttcttggaaggccgggaggttttgcaaaagttttgggaaaggatttggctgaaggcagctgaattttctcagagtaaataacaaggaagtgtaagggaattaatctagataagttagtttacttaggccttgaaacatggcctttaatcatccatgctcaggactgctctcttgggggaaaggatcgcccgaccccccaccccaccctcaccccaccccctgccaccatgttaattacccacaagtgtgttgactcaaagcctttgtcattaaatctgtactgaatatatgcccacagcaccagcttgtcaaggctgcagctgctgactctttacagcaccctcctcggtgcctgtgagtggcccagtcccttagccgtgcagccaggcaaaaaatctgtgtctgcatacattttttcatccatcactcagccagggtctgcgggttggaccccgcatctactcacaaatcaagatgttcagttccgccacccacccctgtctgtcttcctttctcacagtcactctgtaggtgtatcctgaaaatgtaaatcagaccacagcattccctagctgaaaacccttccgtggctccctattactcaccataggctaaattccgcccagactcctctgaagggcttgcaaggcctcctgtgttctagctcctgcctgctatccacccacacccctcattcctgcccctgtaaaccccttgtagctctcacatctcaagaattaaagatttgacccagttgctccgaccacctccgccccgatccccagaaacagtttcccccttctctttctctggccaacttctatcggttttcagaatgtctcccctggccacgcaggatcccttccattttgaggctgataaaatcctgcggatcgcaagctgagcgctcatcacaccccatcgtgattatctcccctgcaaggccaggggctttgagagggtgggactgtggctgacacgttcagtgctccagtcccatcacctgacacttgccatagagaaggtgcttagtatttagaagagtgtgtgcgattaccgagagcatggatatgaagaaggggatcacaaccttgaaaaagtttgttgctgagaaagaggcaagcagccccaactgacgggagctggcctggtcctcacagtttgtctcctgttgaacaatttcacagaacattgacatcagacaaggctattctgactgtgttggagcaagacaaaatcgagagcacttcgtagtcatgtctaaacgcagataaaacaagaacattgtctaaaccacaaaaatgaccagacatcccgcttttttgggctaatgggagtaactgtttaccaatgtttataatgttggccctgcactagtccttctaccttatagataagattataggtacccaattatagaatgattcctactgcctgatggcatccaattgaaccctccctagtcacttaacacaagcccccatccttttgtaagttcttcgtaacaccctctcacaaagacccctcactgttccccacagtgcacaatctccttgctgcaatgagccaataaacccagctccgttcaactgcaggtgtgttcctggtctttggctaaagggcattgacaccacccatttcccagaaacctgaacttgcaaaaaaaaaaaaatacctaattaaacaatttctgcaagctaattgatagtgagaaatgtatttctgatagggagcatcagctggagtagacaactttgtacatactatatgttttccggacagttgcttcagcttctcctgcattgtgtgtgtgtgtgtgtgtgtgtgtgtgtgtgtgtgtgtgtgtgtgtttgcagggggaagatgcaagctttgctgtcctgggtgtccgtgactgggcatgtctcatctggaaagagatcagctaatattccttgagaaaaagaatgttatcactggatgattacatctgcttccagagaggtaagagcatgcagcatggagcagacactctctatcccaggagctgccctgcccaggcctgggctggtggctattgtcatggagtggtaactgtaaggccatcctcataagtcctgctgatatcactccaatccatggacacccctgtgactccgtctccattcctcaggcctgcttcccatggaaagacccagagggaaacgtggttggtggcattggggactgagaacagaacaaaattcaggctttgagtgtggattagagacgcactgtgtggtgcttgcatcacctctgacagtggttgggtaatgggctgaatcacccaatggagacagaatgccaacagatgttagttgaggaggatgattaatctccttcttcgaaaactcagagaatctttattggcaacgttgaagtcaagatagggcttctccttagcaaccggaaagcgcctagtgtgcatggctacagaattcaatatgaaactcagatgatgaaggtagccatgggcacctctgattgcccattgtaaatttctgcctggaatgagggctggggcctcataaatgtcaacaaaagctggtgatgggtccagagagggatgttaggccagccttgatggatgaggaagtttcatttaggggctcctgtcacttcccatcttcaggccaagctgacatccatggctgtaaaattgtcacccttctcctttgcctctcaggaaagcaaaacttctttacgacacttttaatcaaatctgtcttttgccacttctctccccaccctgctccctctgcctttatcctgacaaagaagcgaactgttactctctgtcagttatttgtctgagtaatttcttgatgaaattgcaactataattgaattttctgaaaaccaggaattcaaatgaggcgacaacagaggaaacagcgtgattaaggaattgttattcactcgttgtacatcattaccacccagaattcatcgctggatcgttcacagatggagttgctgaactatgattatattttagaaaatgaagggggaaaaatctaaaaaggcaataaaacatattagaagccttcttgaggaacaggattattactgattaagtatattttgcatgaaaaatgtgctagcactttggcagtttaaattatacgtccgtgcagtcaacatttttgctggtctcaaaattctttgttagtttggtcttctaatcacattcctcttcaccctccaaattgacgacttgaaagaacattagaaatgatcattcctgaaggagcatttgctctcaaaatgcatttacgctcagcagccattaaaaggatatcatccagtcacttagtttctcaatttaactttaaaggaaagttgccttattagagaagtggcctctatttcaatgtaatggtctttgtcacatcttccaatgtgctggcttagtgctgaaggatggggaaaggcagttttcacatattgcagccaccataccaccaaagaaaacaggtgcacttccaggcatcatttagcggggtaccacattcctggttccagtttcctttttagaaaatctgaaagtaactttggggcatatcttttaaggagtactccaacacgactagtggacagaccctaaattaattgccaatcagctctgccttctggtatttacacctttatgtaataacctccacttgaaggtagatgagatctgtgacttgcttctaaccagtggaatatggcggaggtggtgggacgttactcctgtgattacattacatcatgtggctcctttatgatggaagattcatgctagagattctccttgctgacttgacaaagtatgtaaccatgatgaagacttccacgtggcaaggagctgtgggaagcccaggtgctgagactggcatccagcaaacacccagcaagaaacagacgtccttggttctacacatacaggaaatgaattctgccaacatcctgagtaaggctggaactagattctccccaagttgagcctgacaagtaaaatacagaccagccaacaccttgattgcagtcttgtgagacctggggaaaaggacacagctgaaccgtgtccattcttctgacccacagaaactgtcacatcataaaggtatgttagttgttacacagtttagaaaactattacagctgctcaagaaggttagctagctccagatttcaatccattcacaggaaagcaagctttattcctagaagaataattcatgctttgcaaaaagaggaaaacgtcctgcagttttagaaggtcttttctttctcaacacacccaaatttctttaaaatcctcaagaagtgcatttgttttcatggttgactcgaagaagtgagtataattaactcacaaaaggtgggaggaagggacaaattaaattttggtatgcatacaggtagcttcttccaagtgataatgagcaatgtgaaacaaagagattggcattaaatgtaatgaaggactagaggagtgtacctaaacctgaaacaaattccaagaagtggccttgacctaaaatgtttgcatcctgccagagacccttacttataagtcaggagatacctgatgcccaggagaactggtttttgtactctgtcttacacagactaagaattaagaatgcaggtgagaagtttagaaaacttcctgatgatcatatgaaaagacattaaactttacctggtaaaactatgaaatgttgcctgtagatttctaagaaaaatgagtaggaagttggaaatatttcagaattaagaatgtttttatataattagaactctttaagctatgtaattctgaaatctgtgtgacagacttctgtgtaaacataaagaactagttatttttacagattatctagtctgtgtattcatttgatgtttctattacttttaccctcactacaaagttcaatgaaggttaaaaaaatattgttcttaaaaaaagaagagataaacctggagtagctatttcaatgttagacaaaatggattttaaaacaaaaatgttaatacagatagaaagggacattttataataataaaagtatcaaaatatcaggaagataccacaattataaacaaatatgctcctaaaaatagaatctcaaaatacataaaacaaaaactgacaaagttgaagggataaataaataggcagctcagcaatatttagaaacttcaatacctcactttcaataatggatagaacaactagacataagatcaacaagaaaatagaatattttaacaaagctatacaccaactaggcctaatggatatctatagaataatccacccaacaacagaagtcttcctcctcctacttctcctcctcctccccttccccttccccttccccttcttcttcttccttcttctctttctccttctccttcttcttcttcttcaacaggatcttactctgttgcccaggctagagtgcagtggtgtgatcatggctcactgcagcctcaacttcccaggctcaggtgatacatgggcctcagcttcccaaagtgctgggattataggcacaagccacatgcctggcccacatattcttcttaagtacacatcaaacattctgtagaatagaccatatgctaggccacaaaacaagcttcgataatttaaaaggactgaaattatacacaatctgttccttggccacaaagaataaaattagaaagaacttttggaaactcacaactatatagaaattaacatacccataagtaaccaattggttgaagaagaaatcacaaaataaatgagaaaatactttgagatgaatgaaaattaagacacaacatataaaaatttatgcaatatagctaaagcaatgcttagagggaaatttatagctccacatacctacattaaaaatggagaaagttacactgttggtgggactgtaaattagttcaaccactgtggaagacaatatggcgattcctcaaggatctagaaccagaaataccatttgacccagcaatcccattactgggtatacacccaaaggattataaatcattctactataaagacacatgcatacatatatttattgaggcactatttccaatggcaaagacttggaaccaacccaaatgcccatcaatgatagactggacaaagaaaatgtggcacatatacaccatggaatactatgcagccataaaaaagaatgagtttatgtcctttgcagggacatagatgaagctggaagccatcattctcagcaaactgacacaggaacagataaacaaacaccacatattctcactcataagtgggagttgaacaatgagtacacatggacacagggaggggaacatcacacaccggggcctgtcggagggtggggggcaagtggagggagagcattaggacaaatacctcatgcatatggggtttaaaacctagatgacaggttgataggtgcagcaaaccaccatggcacatgtatacctgtgtaacaaacctgcacattctgcacatgtatccccaaacttagagtaaaatttttttaaaaaaagaaaaaacatctcatatcaataagctagacttctatcttaagacgctaggggaaaagcagcaaactaatcctaaagcaagcagaaggaagacaataatgaaagtggaaattaatgaaattgaggacagaaaaacaatagagaatatcactgaaaccaaaaagtggttcttgttttctttctttctctttctttctttctctctctctctctttttctttctttctttctttctttcttgtttcttttgagacaaggtctagctctgtcactcaggctggagtgcagtggtgcaatcacagctcactgcagcctcgatctcctggacttaagtgatcctcctacctcagactctcgagtagctggaaccacaggagtgcaccaccatgtccagctaatgttttcaattttttgtagagatgaggtttccctatgttgcccaggctggtctcaaattcctaggctcaagcgatcctcctgcctcagcctctcaaaatgctgagccaccacacccagctggttatttcaaaagatgagcaaaagtgacaagcttttagctaaactgaccaagaaaaaaagaatacttaaattaccataatcaggaaagaatgagagaacattactaccaacctcatagatacaaaaagtatagaggaatacaacaagccaattgatatgccaacaaattaaattacaaatgaaatggacaaattcttagaaagacacaaactacaaaaactgactcaagtagaaatagaaaatctaaataggtatttaaaaaagattattaaactgagagctgaagacagggcagcaaaactgcaggggccaccaccaccaccaccacatgtcaggaagagtacggagaggccctggaggggcataacgactgcaggaataaattaggagagccaagagaacccacagaccctctgaaggaagtggattgctcctgcaggacctgggagacacctcaaatactgtgctggtatctgtggctgagaaacccacagatggtttgcatcacaggactctgtacagacaacccccagtaccagcctggaacctggtagacatcctgggtggctagatccagaagagagataacaatcactacagctcggctctcaggaagccacatccctaggaaaagggggagagtaatacatcaagggaacaccccatgggacaaaagaatctgaacaacagcctcgagccctaggccttccatctgacagacactacacaaatgaggaggaaccagaaacccaactctagtaatatgacaaaacaaggttccttaataccccccaaaaaatcacactaggtcaccagcaatggatgcaaaccaagaagaaatccctgtttcacctgaaaaagaattcagaaggttagttattaagctaatcaggaaggcaccagtgaaaggcaaagtccaacttaaggaaatcaaaaaaatgatacaacaggtgaagggagagattttcaatgaaatagatagcataaataaaaaacaatcaaaacttcaggaaacaatggacacagttatagaaatgcaaaaggctctggaaactctcagcaatagaattgaacacgctgaagaaagaacttcagagctcaaagacaaggttttagaatgaacccaatccaaaaaagacaaaggaaaaattataagaaaatatgaacaaagcctccaataagtctgggattatattaaatggccaaacctaagaataattggcattcctgaggaagaagagaaatctaaaagtttggaaaacatattcgggggaataatcaaggaaaactcccccagccttgctagagccctagacatccaaatacaagaggctcaaagaacacctgggaaattcattgcaaaaagatcattacttagacacattgtcatcaggttatctaaagttaagatgaaggaaagaatcttaagagctgtgaggcaaaagcaccaggtaatctataaagggaaacctatcagattaacagcagatttctcagccaaaaccctacaagctagaagggattggggccctatcttcagcctccttaaacaaaacaattatcagccaagaattttgtagccagtgaaactaagctttataaatgaaggaaagatacagtctttttcagataaacaaatgctgagagaattcaccactaccaagtcagcactacaagaactactaaaaggagctctaaaccttcaatcaaatcctggaaacacatcaaaacagaacgtctttaaggcataaatctcacagaaactataaaacaaaaatacaattaagacaacaacaaaaaacaaggtatacggacaacaaatagcatgaagaatgtaatggtacctcacacctcaatactaacattgaatgtaaatggcctacatgctccacttaaaagatacagaattgcagaatggctaagaattcaccaaccagctatctgctgccttcaagagactcacctaacacataaggacacaaataaacttaaggtaaaggggtggaaaagacattctatgcaaatggagtaactattcttatatcagacaaaacaaattttagagcaacagcagttaaaaaagacaaagagggacattatataatgataaaaggccttgaccaacaagaaaatatcacaatcctaaatatatatgcacctaacactgaagctcctaaatttataaaacaattactaatagacctaagaaatgagatagacggcaacacagtaacagagggggacttcaatactccactgacagcactagacaggtcatcaagacagaaagtcaacaaagaacaatggatttaaagtatatcctggaacaaatggacttaacagatatttatagaacattctatcaaacaactgtggaatatacattctattcaactgcatatggaactttctccaagatagaccatatgataggtcacaaaatgagccttgataaatttaagaaaattgaaattatatcaagcactctgttagaccacagtggaataaaactggaaattaaggccaaaaggactttctaaatcatgcaaatacatggaaattaaataacctgctcctgaatatcactgggtcaaaaatgaaatcaaaatgcaaatttaaaaattattcaaactgaatgacagtactgacacaacctatcaaaacctctgggatccagcaaaggggatgctaagaggaaagttcatagccctaaaggcctacattgaaaagtctgaaagagcacaaatagataatctaaagtcacacctcaaggaactagagaaacaagaacaaaccaaacccaaattcagcagaagaaaggaaataaccaagatcagagcagaactaaatgaaattgaaacaaaaaaattacaaaagataaatgaaacaaatagctgattctttgaaaagataaatacgattgatagaccattagcaagattaaccaagataggaagagagaaaatccaaataagctcaattagaaatgaaatgggagacattgcaactgaaaaccacagaaatacaagagaacattcaaggctactctgaacacctttatgtgcataaacttgaaaacctaaaggagatggataaattcctggatagatacaaccctccttgcttaaatcagggagaattcgataccatgaacagaccaataacaagcagtgagattgaaatggtaattaaaaaattaccaataaaaaagtccaggaccaggtggattcataccagaattctaccagacattcaaagaagaaatggtaccaatcctactgacactattccacaagatagagaaagaaggaaacctccctaaatcatcctaggaagccagtgtcatcctaataccaaaaccaggaaaggacacaaccaaaaaagaaaactacagaccaatatccctgatgaacatagatgcaaaaaatccttaacaaaatgctagctaaccgaatccaacaacatatcaaaaagataatccaccatgatcaagtgagtttaataccagggatgcagggagggtttaacatatgcaaagtcaataaatgtgatacaccacataaacataattaaaaacaaaaatcacaggatcatctcaatagatgcagaaaaagcattcaacaaaatccagcacgcttctatgattaaaactctcagcaaaattggcacacaagggacatacctcagtgtaataaaagtcatctatgacaaacccacagcctacataatactgagaactggaacaaagatgcccagtctcaccactcttcttcaacctagtaatggaagtcctagccagagcaataagacaagagaaagaaataaaaggcatccaaatcagtaaagaggaagtcaaactgtcactgtttgctgatgatattattgtttacctagaaaaacctaaagatgcctccagaaagctcctagaactgatcaaagaattcagcaaagttttgaatacaaaattaatgtacacaaatcagtagctcttctatccaccaactgcaaccaagctgagaatcaaatcaagaactcaacctcttttacaatagctgcaaaaaaaataaaataaaatacttaggaatatacctaaccaaggagatgaaagacctctacaaggaagactacaaaacactgctgaaagaaatcatagatgacacagacaaatggaaacacatccaatgctcatgtatgggtagattaaatattgtgaaaatgacaatactaccaaaagcaatctacaaattcagtgcaattccatcaaaatactactatcattcttcacagaattagaaaaaaacagtcttaaaattcacatggaagcaaaaaagagcccacatagccaaagcaagactaagcaaaaagaacaaatctggaggcatcacattacctgatttcaaactatactataaggccatagtcacccaaacagcatggtactggtataaaaataggcacatagggttgggtgcagtggctcacacctgtaatcccagcactttgggagaccgaggcaggcggatcacaaagtcaggagattgagaccatcctggctaacatggtaaaactccgtctctactaaaaatacaaaaaattagccaggtgtggtggcagacgcctgtactcccagctactcgggaggctgaggcaggagaatggcatgaacccgggaggcagagcttgcagtgagctgagatagagccactgcactccagcccgggcgacaaaacgagactccatctcaaaaaaaaaaaaaggcaaatagaccaatggaacagaagagagaacgcagaaataaacccgaacgcttacagcaaactgatctttgacaaagcaaacaaaaacatatagtggggaaaggacacctcattcaaggaatagtgctgggataattggcaagccacatgtaggagaatgaaactggatcctcatctctcaccttatacaaaaatcaactcaagatggatcaagggcttaaatctaagacctgaaactataaaaattctagaagataacattggaaaaccccttctagacattcgcttaggcaaggatttcataaccaagaaccaaaagcaaatgcaataaaaacaaagataaatagctgggacttaattaaactaaagagcttttgcacagcaaaatgaacagtcagcagagtaaacagacaacccagagagtgggagaaaatcttcacaatctatacatctgaccaaggactaatatccagaatctacaacaaactcaaacaaattagcaaaaaaaaaaaaaaaaaaaaactaccaaaaaaaatcatcaaaaattgggctaaggacatgaatagacaattctcaaaagaagatatacaaatggccaagaaaaatatgaaaaaatgttcaacatcactaatgatcagggaaatgaaaatcaaaaccacaatgtgataccacctcactcttgcaaggatggccataataaaaaaatcaaaaaataatagacactggcatggatgtggtgaacagggaacacttctacactgctggtgaaaatgtaaaactagtacaaccactatggaaaacagtgtggagattccttaaagtactaaaagtagaactaccatttgatccagcaatcccactactgggtgtctacccagaggaaaagaagtcattatacgaaaaagatacttgcacacacatatttacagcagcacaattcgcaattgtaaaaacgtggaaccagcccaaatgcacataaagcaacgagtggatatatatatatataaatggaatactactcagccaaaaaaaggaatgaattagtggcattcacagcaacctggatgagattggagactattattctaagtgaagtaactcagcaatggaaaatcaatcatcatatgttctcattcataagtgggagctaaactatgaggatgcaaaggcataagagtgacacagtggactttggggactcagggggagagggtggggagtggatgagggataaaagaccacaaatatggtgcagtatatactgctcgggtgatgggtgcaccaaaatctcacaaatcaccaccaaaggactcactcatgtaacaaaacatcacctgttccccaataacctatgaaaataaaaaaaataaaaataaaattttaaaactaccaaataacaaagaaattgaatttgtcattttaaaacttcccacaaagaacagcttaagcccagacagcttcactggtgaattatacagaatatttaaattaaagaattaatgtcaattcttcacaaagtcttctaaaatgtagaagaagaggggacattttccatttcattttgtgaggccagtattatcccattaccaaaccatacaaagccactacaaagaaaactacagaccaatactgcttatgaatataaacataaaaatcctcaacaaaatactagtaaactgaatccagcagtctgttaaaaagactaacaccatgaccaaataggatttatcaaaggaatgcaaagttggtttaacatttgaaaattaattaatataatacataattcaatagaaaagagaaaaaaacacatgatcatcttattagacacagaaaaatcatttaacaaaatccaaactgacgtcatgataaaaacactcaacaaactagaaatagagtggaactttctcaatgtgataaaggacatctaccaaaaatccacagctaatatgataaataatggtaaaagactgaatgtttttcctctaagatcaggaaaaatacaaggatgtctgctctcagcacttttattaaatattgtactggaagttctagccagaacaattaggcaaggaaatgaaataaaatgaactcaaattggaaaggaagaaataaaactatttccggatgataccaccttatatagagacaatcctaaataatccattattagaattatcagaactaattaacaagatcagcaaggttacaggatataaaattaaaattcctatacactagtaatgaataatccaaaaataaaattcaaaaaacaatcccacttacaatagcatcaagaaaataaaatccttatgaataaatttaacagaagtctaaaacttatatatactctaaacacgacaaaatatcattgaaataaattaaagatggaaataaatgcaaagacatccatgttcatgatcagaagacttatattgttaagatggcaatacttaatattataaagtgatttacaaattgatttataggttcaaagtgattcgatgcaatctctgtcaaagtttcatagcattttttgcagttatttatactgcaaagtgatttacagatttaatgcaacccgtgtcaaaatcccatggccatttttgcagaaatggaaaagctattgctggaattcatatggattgcaagtgaccccaaatagccaaaacaatcctgataaagaacaaagctagacaaagtccatcttgcacttcctgatttcgaatcttacttcaaagctatggcagtgaaaacattgaactgagtacggtaatatttatcatctcaaaacctcacaacaatgcagtcaagtggaaccactgtctcagtatttcagatgcagagcccaggctcaaagaaatatggggaattgcttgaggtcagagagctgggtaaccacaaatgcgggtccacattcagatctgccctaagtataaagacattgcatcctctcagccactacctacaccactcttgagtttcttcgacacaggacctgtgaacagacagcccaagacgcttgggaatcatggaattctaacccccaaagcctggcttagggacctcatccagcgaccagacagggcgtgttgtgcctcatccacatttctgaaagtgtccactcagtggacagcctgctttctagtctctgccctactggcttgagtgtggatgcccagacggttaggaggcaagctccagagctcccatatgatcacttccactgtcacctgtgtgccacaagtgctctctgtacacatgctccacctgttctgatgatctttcagtctttcaacttccaagccatgtgagggatccttcaggaacatgagcactgggacatgctggacgctggagagagatgcagacacccagagctggctgagctaacatgctacagtttgtgaggaggagacacaaaatttcatacagatgataaaatttttctgtacaacaaacctttgctatagatcctacaatatatccattattctcactagaatgtgaacatgattctgcaaattcctagggagaaaacccagcctgccccttatcagaggctataaaccacctgtttttctttccatcctccttcccttgcttccctctcacacatcagtcctttagagaaaactgagcttttccaagctgttattgctcaaagaaatgtcttcatccaagggaaccaagggatgtgaagggcactggcctccgaagcatttgccattgtcaacttttattgagcacctactatgtaccaagtactgtgctaggttctgacgacactgaagaaacaaaaaaatagatacttcctaatctcaagggacagtccactggtggagtcagaccttcatcacgcacacacacaaacacaaagagagagacagaaagagagagagagagagtgagagagaaatacatgtattcagatactgctctgaaccttatctgggtccggagggcagagaaggcttcttgaactaggacctaagaaatgggaagaaatttgctagttaagcaggtgttgggggaaggtcctcagaagaacattctagaacaagtgcaaggtcccaagagggagggagatggtccattcctgcaactgaaagaagaccaatgtttctgaaccacatggagcaggaggaagcagcaggagaatccaacagggggagggtcagaaagcccatgtttgtaactaaccggaacgatgaatgtggtttggaagacaagtgagaggatgtgtaccacgggccagatgtgggagaccaaggaggggactagtgcatttttccagtaaagaaataatagtgcttggggctagggaggctcaaattgagaagaagacaagtggggaggtttaagagagatttctaaattaaaatgtacagggaatagtgacagatgatgcatggggtagagagagagaaggcaatgtcaagagtgactcccaaatctggcttgcaaacagaatgaacggtggtgtcattcactgagaaaggacacccaagaggaggatgtgattagcaggggagagagcaggagttcaagctgatatgtagatccacattaatatgtctagtcagaatgtggatacgtaggtttggggcttagaagaaaggtctggggtgaagatctaaccctagcagtcatctgcaaagagatggtaataaaataaatacaatttttaaatggatggaatttccagggaaaaagcagagggtgaaatgagtaaaggatctagggccaaggctaaaagaaatccattattagaaacagaaaaggtgtcttagtgcattcaggctgctataacaaagtaccatagcctgagtggcttataaaccacagaaattcatttctcacagttctggaggctgggaagtctaggatcaaggtgcaagtgagagtctgccttctggctcatagatgctgccttctggctatgttctcacatggtagaggatgtacggaagctctctgcgacttcatttatgaggacgctaatcccattcatgaagactccaccctcatgacttaatcacctccccaaatccccacctcctagtaccatcaccttgagggttaagatttcagtatatgaactttaggggtcacaagtattcagtctatagcaggaggaatagccaagaaggatgaatgaaaatcatacaaggatgatttcatggaaggcaagggagtacaatgtctcaaataaaccaagtcctgagtcaaacattactgagaatgtgagtgtaataaaaccgagactcaaaagtaggcattggatgtgatgacatgactatcactggttaccttagggagagaagttttggcggagttgacaagcacagtcagatggaatgtgctggcggatggcaaagatggggaaatgaagatacccagtgtagacagcttctgaaagcagctggccgtgagtcagaggtagacaggaaagtgactaatacagtgcagaggtcgacgtttttagctttattgtatttaagagagagacctgagcacatttaaaatgctgatgtgacattgtccaagctgagaggaaacaattagatctatatgagagaaaagaatgatgaatatcaggcaagtatggcaaagaccaccattacttttgcaccaacccaataagaaagttggaggatcttcacaaaacaaaggtggttttggcctgagtggggaggaggaacagcttctttactaccagtggaaagaaggagaggctggtgcaggggcagggaggtagcagggagcagagggaggccccatccacgctcaggttcttagaatgaggaagatgacattggcaggaccataggtgagcatcttctaacccaaggaagatttagaactaagtataggctgggcgcggtggctcacgcctgtaatcccagggcttcgagaggccgaggcgggtggatcacctgaggtcaggagttagagaccagcctgatcaacatggcaaaaacccatctctactaaaaatacaaaaattagccaggtgtgttggcgcctgtctgtagtcccagctactcaggaggctgaggcaggagaatcgcttgaacccaggaggtggaggttgcagtgagctgagatcacgccattgcactccagcctgggcaacaaagtcagattccatctcaaaaaaaaaaaaaaaaaaaaaaggaaactaagtatagaagtatggaatagaactatattctttctattaagatatttgtgctttgaaataagctatgtttacacacttgtaatgtttaagaatctgtggcctttcagagtcatatatgaacttttccttctaatataaaatgtttaacggagcaattgactttgacatcagattctaagttgaaatcttactgtatttaaataagatttggaacctgtaaaagaatttaagccttgccgtctttagaagtttaatgaattagatttataacaattacttaaatatctgagaaggtttgttagacaattgaagtacttaaaaaggaattaaaatatattaagcctataaatgcagtttacaatgtttagagcaatttaattaaaaacatttgtaaatgagacgaaacatttctcaaaggtactcttaaatgtgattgttaaaatttgctagacctataaataaataataagattcgtaagctgaatttcaaagcttatggaggaacttgggtccatatgaatttgttactttaataaattgaatgttaattttgaaaaacaaagaaacctttcatcaatatttttggcgcctaagagctgctcttgagggcatctaattaatagtttttttattatttaaaaaatatcattaggccaggtgcagtggctctctcctgtaatctcagcactttgggaggccgaggtgggtggatagcttgagcccaggagtttgaggccagcctgggcaacatggagaaaccttatctctactaaaaaaaaaaccacacaaaaattagctggatgtggtggcacaccgctacttaggagactgagatgggaggatcacctgagcccaggaggtggagggtgcagtgagccgagatcgcgcccctaccctccagcctggaagacacagtgagaccctgtctcaaacaaaatttttttaatggctataatgaaaaaaaaaaatcaaccagtatgtaaggaaaaagctgaagccctttgccccatttcccagaggtaaccatcattacaagttccttgtgtttctgcccagaaatgttatttgcataagcatagaatctctccccagccccatttttaaacaaagagatatattctgcatctaacattctgtactgcttttgtgcttaacaagataacttgagccgggtgtggtggttcatgcctgtaatcctcaagctttgggagctgagacaagaggattccttgaggccagaagttcaagatcagcctgggcaacatagtgagacccgatctgcaaaaaaacatgtaaaattagctgagcatggtggtgtacacctgtagtcccagctatttaggaggatgaagcaggaggatcacttgagcccaggaattcaaggctatagtgaaccatgatcacgccctgcactcctgcctgggcaacagagggagaccctgcctcaaaacaaacaaacaaacaaaaaacaatatatcttaaaaacatgttcatgtttcccataagaataaagattaacatccctctctcccttcctcatcgcctttggggtgtggcctcatgcctcccctctgggttgtgcccaaacttctctcaagagtggatcctctcactgtctctacttcctgcctccccagctactgactgtaccaagactgtgctttctgagggcaccaatgccctccaccttaccaaacccgctagaggcttctcagttctcatatctcttactctccggctttcaacacgtgagccatcttttccttgctgcattgcaaagccacctttatctagcaatgaattcccatttgtatctgggtctatttctggcctttccattctcttccattgatctctctgtccttgggtgcaagttttctgatgacctgacttgattcatggataaaacctatactcttgcagaatgaatgtccttcactcaatcctccataaataacaattctttcaatagagcttttctctctttcttaataagagatagggacagcagaggttcacgtatttcctggcaaggcccagaatgccgttattcttgattgagggcagagttatcagccaggcagatagtggaattgatatccctgtgtgaaaatggaagagccaatctgagctgtcgccccattcctacagaactagctgcccgtctttgaattcccagtgctcattcaggcctctgcactttcacttgagcacatctggcccccactttctcctttcctcctctcttctactaaatagtaaaagagctcttcttcacatctcagctcaggtgtccccttgcccaggaaacctttcctgaggctcctccctatgccccacattagccactctgggcttccctctgccccagcccttaacacaacagaatcaacatgcctgtaacagaattgccctatgccccctctcccctagaccaccgtgagctccccaagggcaggacctgtctctcagcagacttttactcttgttaccgaactgatcttgggtctgcccacccggcacagtgcagccaaacactgatattgggattgcagccagagaaagtgaggcatttattgcagggcgccaagcaagcagaattgggcagctcatgcttaagatcagaactccctgatggcttacaggtaagggtttttaaaggtagagggggagaggttacaggcaaaatcataaattaatacatggagactatgtgttggtttggcctaaaaaggcaaagcatcttgaagcggaagtttgggagtgtggcaagtgaaaggtggattcaaagatttttcagtgttgtgatgggttaaggaggtgaagttttgtctaaaattttggtgtaggcagaaaagaacgttagctcttgcccgtgggcatgatctcttccaggtccctcagcaagaaacttaggagaaagcatggtggttggagttcggtcctcagcttccccttatccaaggtctctgtgcctgcagatggcactttccatttggtggaggtctgggtttctgaaacacaactcagggacgtaggttgagatgttatctttagtttctacaggaaaccaaatatcctatgactctaatttccttggctattgtcttaagctactattaccttcttgcttgtcaagttgcgcatttacttttcaaggcttgctacgtgcctggaatttctagattttcctttatttccatgcttggggagaggagtgcctggcaggctcctaagaggggtctgtgctccatctcgccccctatcttgaactatcggttgggtgctctagaatctgtatggggtggaagtgttcattcattttctgtacaaaagcaatcaatgcttattgtggaaaacccaaataagagagttgctctaaacaacaccctccccagtcccaataccttgtccagaagaaaccactgtttggtgagtatattagtcaatgtctgcagaccagatcggatgaccaagttttccataaatggatggccatccacttcccttcaagggcgagggtagtttgttctgatccatctcccttttcacagctcagggagggaggaagacccaggaaggagagctgccacagttactagtggcccagctgggatttaaagtccgccgtgactgaagcttggctccacatgccagtctgcaaggccctgagtgccctcagcagtaattccaagcaaagcagggaagcagcgggccaggtgctgaactgaactgctgctcagggctcctgagcctccccctgcctcctccctctcttctccaccctggggcctctctctctgtccctacttcctcctttagatcctctttcccctgaacccactcatttatcaccttttgatgagttccaccaggcagaccatgtcaggaaatttcttggtgttcattttaataaaacttaattattaagacagcctcacaagtcatgatacatttactggttcatttttcacatctccgtcagaggcctcctggcagccacgtgggaggcatgaaggctatggggtggaagtgtcagagccttttctggcctcctgcaggagctgggtttggggaagcagttcctgacccttcctctgccggcccacccccgttattctccagacgctgaggatgggatggaatgagcaccaaacatggagtcaggagacctgggactcaatcctcctcctgctgcagactatgctcagaccctgctgaaggaaggcatcctctctgggcctcagctgtctcatgtacaagatgggaatcatctcagtccaaaccagacagagccactgtgagattcagaagaaagctctcgcaatgagaggcctccccaggcagatggaggcaaaactgcaagggtggattgacgctggggcggcgcctgccccacagtcctgtaggtccgcccgcctgggtaagggatggggtgaaattgggggtctctgatgatcacagtaataactgactttttaaaaaattttatttttccataggttattggtgtacaggtggtgtttggttacatgagtaagttctttagtggtgatttgtgagattttggtgcacccatcacccaagcagtatacactgcactccatttgcaatcttttatccctcgcccccctcccaccctcccccccaagtccccaaagtccattgtatcagttttatgcctttgcgtcctcatagcttagctcccacacatcagtgagaacatacgacgtttggttttccattcctgagttacttcacttagaataatagtctccaatctcatccaggtcactacaaatgctgataattcattcctttttatagctgagtagtattccattgtatctacatataccacagtttctttatccactcgttgattgatggacatttgggtcggttccacgattttgcaattgcgaattgtgctgctataaacatgtgtgtgcaagtatctttttcatataaagacttcttttcctctgggtagatacccagtagtgggattgctggatcaaatggtagttctacctctagtactttaaggaatctccacactgttttccatcgtggctgttctagctgacattccaacgagcagtgtagaagtgttccctgttcactgcatccacacctacatctactgttttttgattttttattatggccattcttacaggagtgaggtggtgtcgcattgtggttttgatttgcatttcccttatcattagtgatgttgagcattttttcatatgtttcttagccatttgtatatctttttctgagaattgtttataattgacatttattaagtgctttgcagacgctgtgccaaggatgtcatgttgtcatatgtattagctggctaaatctcacagttgctgtacttgttactaatattgtaaaatgtgtaccagtgttatgcccattttatagttgagaaaactgaggcatagggaggcaaaagcaacgtgcccgaagttacaaagccagtcaatggtggaaccagaattagaactctggccaactccagagtctaccttcttaccaataaagtcatcacccctgagaaatcagggaggggccaggagtttttaataatcaaagcaacctcacaccgaagtctaagggaaagcagaggttcggctgagcaccagggcccctggcagctcagcatgggggccgtcagtgacacctgcactcatgatatcccacacctgtggtcttccaaggggacagactgaactcttgccacttcatccacaaagcccccctctatttcctcctttccctcgactgcacttccttgataacagacccaattttgttcagcaattcacccccagggaagctgacccacaaatcccatgatgccaacagggtcccagtatctttgccagttctctgacccagcctcacaccagggtgtggcatgagcaacgagacagggtagtgttggtgcaggtgacacagggctaggatatggcacaggaatttagaaaataattagactgcgttgggcgtcaggacacaccactccaaaatatgactgtaggcgaccaggaatctgccacagcaaaatctactttggcatttttcaagctagttattatgagaaactgcagacacaggagtagctctgaaaagctgtccttttgtaaaagaaatttacatctataaaggaaatccacattagtaaaacaatctgtatcaggaagagggctgctcagagacagcttctattacccgagaggctttttatctttataacgagacaacctttacttatcatacatttcctccccttaccctccaagaactccaccatctccgagaaacccaaagcacccctattcctttctgtagctcaggatgctacattagcttcaatcatctggccctactttgagtctcatgtattgtgggaacccccgccccccatacctatgcaagtaattataaatgtttttgcttctgctaatctgtcttatgtaaatttaatttatagctcagtcaaagaacctagaagtgtgggggttaaccaccgttccctcccctgcaagaggattggtctatgagagaagtcagcttccatttatcgagcacctagtaagcaccaggccccagaccttaagctttacatgtgttatttctgattcccatagactcctctagcttcagtggtattacttgcattttgctgatgaataaacggaggttcagagagggtaagtgacttgtccaaggtcacacaaccaggaaacagcaatgctgcgagtggaacccaggtgttgtgtccgtgggtctgtggtctcgctgacttcaagaatgaagccaccagaccttcacggggagtgtgacagccctcaaaggtggcaaggacccaaagagtgagcagcagcaagattttttgtgaagagcaacagaacaaaccccccaccgcgtagaaggggaccccactgggttgccgccgctggtcagggtagccagcttttatttccttatttgtccctgcccatgtcctgctgattggtccattttacagagtgccaattggtccattttacaaagtgctgattggtccactttacagagtgctgattggtctattttacaaacctctagctagctacagagtgctgattggtgcattttgacagagcactgattggtacatttcacaaacctctagctagctacagagtgctgattggtgcattttacaatccccttgtaagacagaaaagttcttcaagtccccacccgacccagaagtccagctggcttcacctctcagtgtgaccaacctccaagcttttttatttcattgcttggcttccctctctaccatgtccatttctgcacatttatttcagcctcacattgaccagctcctgcgtgccaggcatggcctaagtgttattcgaacaaagcttcggaagctagtccacttgcttctgtctagaagaggagggcggtgctgggaggaacctccctgactcctgctgcagacccactgagaggtgactcccacacggctgtcctggaacaagacagcagcttttcttaggttgttctaagttaagggctctcactgctggtaagacagggaaatagaggagataaaaataacaaaacaaaaggagaagtcacaaagttacaggaaatctcaatatatctttctgttctggatgctgctccaaacacaactgcagcagggcctctttgtggggggttcttatttgagagccacaaaggacctcaaagccaaaacagactgattatctagcccacctccatgtcctcccctccttccccctacttccttactaacagacccaattttgttcaggaatccaccccctgccgagaagaaactgatcctattcccagctcagagccaaatcctgaatcatccaatattacccccttgtcaggagtaggttgaggggtgacaagtggcccatgctttttctggggtcagggagaagaaatgattattagaacaattttggtttaaactttttttttttttttgaaacagggtctcactctgtcacccaggctggaatgcagtggtgcgatctcagctcactgcagcctcaacctctgcagcctcaagtgattctcccacctcagcctcctgactagctgtgactacaggcctgtgccaccatgcctcgctaatttttgtattttttgtagagacagtgttttgccatgttgcccaggatggtctttcacttctgagctcaagcaatccatcagccttggcctcccaaagtgctgggattacaggcatgagctactgcacccagcctaaacttgtttctaattagcagttccaaatttttagatgctcatatctctgactaattacaataacagatgatgaaatatcgaagtgttgaactgtcctctcaattccagccggaacaaacagattctgttttctctacattttgactgaactgtcttggtgtcatacattagatggtaaacttctcctctgttccaatctcccccttcttcatggctaattagttaaaagcacactgttgataaacacaatatgaatagaaaaatttttgtttagccttaaaaaatagcagtatgacaatttgtcttgaattttgacctttcagtggtggcttgtatcaaagttacggtcttgggatagtgctatgacccgctgaaatggctgcgggcctgaaattttgatcgtaaggcaaattttggtacagaaaatcgcctgtttctgctgacttctgctttagacatccactcttaaggaaaagcattgttatcccaccagctaacacatcactctctaccatatatcaaagagtctcaagatccttctattcatgaaaaatgaaaatattctcaccacatcctcgcagtaatgttcaacataaattaccaagcacagagacagtttgggaatgtacattataaatggccttccctacaagactaagagtgaatcctaatgtaaactatagactttgggtggtaataatgtgttaatgtcggttgacagattgtaataaatgcaccgctgtaatgtggaatgttgaagtgagggaagctgtaagtgtatggagacagataaatgggaattctctgtactttctgctcaattttactgtgaacctaagactgctcaaaaaagtagaagtaagtaaatacataagtcagtaaataaatggccttttcttgggctgagaaatgaagacatttcctatatgttacttggacctgtaaattcactctggggagatatatatatatatcagaaagtatatgttacttggacctgtaaattcactctggggatgtgtgtgtatatatatatacacatatatattacatatatatatatacacatatatattagaaagtaaatatttcttgttaaaatctgagatataactgccctctaaaggtgtttatttcctgggttggcttttttgttttgttttgttttgtttatttgtttttgaggcagagtctcgttctgtagcccaggctggagtgcggtggcacagtctccactcactgcaacctccacctcctgggtcccagttcaagcaattctcctgcctcagcctcccaagtagctgggattacaggcacatgccaccatgctcagctaatttttgtattttttagtagagacacagtttcaccgtgtgggccaggctggtcttgaactcctgaccttgtgatctgcctgcctcggcctcccaaagtgctgggattagaggtgtgagtgaaagcacctggccgggttggctcttatctatttacttgatagccaggtttggagtcattagtggctgttgcttactccttgaacaaacatttttgagtgttgtgctgtacaggccactggatagatagcgatgaatcccacacagtcctgtcctcagagcccacatcttcatagatctataaattaatatttgcagtagagtatgacaaaaaaactccaatagaagtgcctccagggaagatggtaccaattgaactggttgctggggaggtgtcaggggagggttcatggcagaagcctcattgaaggatctcagaatttcatgcctcctgggaggttcagtccaagacacctacctccatctttcagtgcagagggcacatgaggggacctgccaagatgaagccagagaggcaacagtggtcaaatgatagaaggcctggggcgggaaggggcaggtaaagatttggggctttatccaaatggactttattgtagttgtattcatttgataccttttgtaagttccttgtttagttattacatgattatcataaagtttgggagcataatggttagaaagatatcacagacttaggaaaaggatgcatgttcctttaatttggctcttttaatggactgagagactatgcaacgctcatggctggaggacaagcttccccggccttccagtcccataaggacacctgctgttaatggcagtcctgatggagtgtagatccctcgggctgccatcctcacaaaggtgtgttactttctggctggcagctccagatggccctagggactctgaactcagcctgtgtccgaaggcttactgcaagactgtgcgactccaccatggtcagtttccccggggaaccatctctctaccaagcccagttttccattgcaagaacaattgccaagatgtctaagtttctatgtgagaattttggcatcttgggttccttttaaataggacacacttgtatgctctaaagaaaaaaagaaaaggtttctcatgaagcattagctttcaagattacagttcggtaggatgttcaagatgcttagggtgaataaaaatgacagacagctgaacacttcctataaatgaaacaccaatatagatctaagtttcatgcatgactctcaatgtggttaatgaaaaggaagataaaaaaaaaaaaggttggccatatttgcagggcatttgctcccaaatgtttcaatcctgttttctttagactttgaaaagggggattgcacgttatctgtcaagaaggcatcaaagcagagaaatccacaaatgtgtagtgtcagatagaattcaagccttcagaaaggactccactcctttggttactaagagaactaggggcttgtatttctaagatgtcactagctggaggcgctgagcaggtaatggtctatgttttcctagactataaaatcctgattatatggtttaataaaataagaatctcagagttctgatggaaaacaagtaaacttcaggtcttagcaggcactagcagaaagcaccagagaaaactgggggagaggttaggactcctgtcccaaagatccccctcaattatcctgccatgttatcagttccctctttacatgttaccaaacatgactactaatttctatttttttccaagactattagatgtattcaaaattcactcttcttacaaggatagagaaaagtgcctatcgatgcttaataacccaacatatatttaatagaagaattaaatcaccttctgcaaaggaccaagaaaagctccatttgatcaattcctttaagacatgaagacttctccttttctaagaatcgccatagtaaaatgcaagctcagcatgacataccccaaggaaaaatgtatctgtcccttctgcttttactacagttccataagggtaataccgagttgttttgcccacatgggggctctggaatcttggctgtgatgcattggtaggatatttgtcaccaaaactgactcagcaatcagttaaatattaaacaaagcactgattagtgttcctgattcatatttgtgctttgtttaacatttaacttccgaattttatacatctattaaacaatattcctcttgacattcgaacactatctgcacaattaataaatcaaaaacttattaaaaattgaaacaattaaaaattcccaaacttataaaccattgtttacaaaattatttaaccacactctccaacacttttaaataaaaccataagtttaatatgtcagacccttttaaatgtttcaaacacctaaaaagtcagcaaaaatgcacacaaaacgtcatactgattgaaaaatatatatgcacacttacctttacactggttacaaaggcatgaagattatgggtatatattggttttaaaaagtacttttatacttattcttatattttctctgttactttcttagagtcaatgcgatcgtttcctaggattagagtatgaagtgatacagtttctcctaagaatacaaatttctttcagaaccaaaagaaaaataatctcaggccagccagctctggggttactgattcttatttgaaactgataaagtgtctcccaacattattgcacttgagcttaaatgtggcctaagaatataaaagtccgtgccttcacattggtatccttttctgagaccagagtgtttcctaaagtgcgcttcatctcctaggagactagggattttttttttttttttttgagacaaagtctcgctctatcacccaggctagagtgcagtgttgtgatctcggctcactgcagcctctgcctcctgggttcaagagattctcatgccaccacgcctggttaattttttgtattttttgtatttgagatggggtctctccatatttcacaggctggtctcaaactcccaggatcaagtgatccacccacctcaacctcccaaactgctgggattacaggcgtgaggcactgcacccggccaagacgaggaatttaaaccctgcagtttgctgtccttacgagcacatttggccaattatccttccatgttatcagttccctctttacatgttaccaagcatgactactaatttctatttttttccaggactattagttgtattcaaaattcactctttccttcttacaaggatagagaaaagtgcctatcgatgcttaataacccaacatatatttaatagaagaaataatatcacccatatataaatctgccattaaaaataatatgaaataaaaccctatcgcatttgccatttacatcaacttttctcttcatagcttcattaggaacttacagctcttcacagactccatgtgttttaattgattatagccatcaatcttatttgatattcaaaatctcagagcttgaccagaggaaacctctttaatctagcttcttagtccttccagaaccaccctgtgatattctagaaagcatccttgctttctggttacaaaagaaacttccaggcttaaaccatttgttttaccctactcaggacaacccttccaaagagcccctgtttctttaagtggagaaaactgttagagacaaagtctggccatttaggggtacaggagagttgtggtgggcattagtactactcctgctgctgctgctgctgctgctgctgtgtccactgttagtgacagaagtgggaaaatatttaagttgagttcacattagtgttcccagtttagcgtgagcattgctccattatgttgttctaatgtaaaaatgtcaaacacatttttctcaatgagatacttaacattttaacccttcatccaagctatatgttacacctcacttttctatagttgtatatttagaaaataaatatttatgaaatacttgatatttctcatcaatccttggtcactcaattgaagggtgtagaagtaaggtcaggttcaccttagtgaggggcctgcatctaaccttatctgaaggggcttatgaatttgggatttattaccttgacagaaagaaatattgagaatgaccccacccatgctttatagcaatcgctctttatagtttatttcatagtgacaagaaggaactcatccatggtgggtttttccctgagtggtctgtatggtcatatcagaactgaaatcatcccttcttgcttctgagcccccgtttccaagtcttgttctttgtttctgtaggtagtaaagtgaattctttaaatccctgccctccatcagctgctaaagcattctgcttccctctgataagattaacagaatgttggctgtggttacgggatgctttgcagtctatgtcttaaaccaagccagccatgttagcatttcctctagtggtggtgttttaggccaattgagaatgtgggtgatattaatattttccaaccagctgataacaggaaagacacttctgcttggagtccactttgagaagagatttattatttaggcagcacaggacacctccattaatcttcccccagcagtgcccatctaccatcaagttcatatactttccccagggttcaaagaagggtataattttagccagcgattagtcaatatttatcaataagaataataacagtaaaattacaatggccaatgtttgaatccctaatgtgtgccaggcacagtacggggccttttgcagctattatatcataaaacccttacaacagccccatgaaatttgcaccatgatttgcttcattttacttttggggaaaccacggatcaagtaactgaagtgatttctctaggactcacagatgagcggtggcagagcctggaattagatatatctgatgttagtgttttgaggaatcactctccccaaaagccatagctcccagacattcttatgtaatttgtctttgctgaggcttgggtattgatgatttaaaagtccccagagaccagatttcatctggtatgctgtgggagtcaagtaacgtccaaggccaagcctgtctgagagaggtttttattagctccaaaattataataacttccacagccttcttccaccaattctgccttccactgaaacagcgctggtgatgtttagaggtatgagtttgggacaattatcaggagaagcattttggtgctattgtcccaccccttctgtcctgagaggttttatctggtctttcagtatttcaaataggtcatgactagattccatgcatccctagaaaacatagcctaaattttaaattaaagtatgaggtggaagaaacagcctttcttcccttttgtttccaaggacagatggagtcaaaagtggaactggggcccgcagagccggatagcttgggcagtacgtgtgtgcacctgcaggctgtggagacaggtatttccatggagctcactcgccctgcctctcatccaggcctgaaaatcataggtaactatgaggcaagaggaacccagggtggtgggaacaccctagggtgatcccaggctggggacctttggactaaaaagatgaaagccaacattccctccccaggaggagatgcaactcctgcactctctagtgaccatcactgggatattgcacagatctgcagtcaccttctaaatccccttaaagtggacctagccatcctctccattttaagaccacatctcctgtctgctacagcccctctcgcttctttttctttaaggatatctggctggttgtattgggttaacatgcaagaagagagtaccaatcactccataacttgggtaatgcatgtcaatggtgatctgtgtggggccgcaaggttccagatggttgggacaactctacaatcagtcacatttgggttggttaaatcccccactcatctttacagctgtatcctgcaagttagtggctgcctgtctctgaacttcaccttccttatggttgtcaaaaatacctccatgggataaaaacgcagcatctgtagattcccaaataggtgcaagtagattcccaaataggtgcaaataggttcattcgttggttcattctgcagtcagggagctttcagtctactggcatgcaagacgcaatgataatgagaatacttcacaatgagtgtgacgtgatgactgatgaatgtgacaaaggagaagtaggatgcacttagacagcctgggggaattgagttgtggccagaagggagagagagtgtccattctccacctcatcactttgctgccaagagaaacaggaatttcttagacaagttctcaggtccctcggtgagactggcagcctaaaaaaggcaccagggagcagggggcactcacatcatgccatccccccacagagcatcccgctggccatctgcatcagcccgacccccacaggatagaagactggcacatccaagttgctccttccacaccctctccccactgaggcctcgtctcctccgccctgtggccaattgaaggtgaactcctaacgtgcattctgcctgggatcccagaggttgtggcagccagatgagtcacctcacaaatacagcacgtgttcctcgggggcggcggtgggaggaaacacgtgaagagctctctctgtgataatagaccatttagagcttcagatggcgaaaacaagctgatcaggtgcaggccctccaggaggctggcaggtgactcccagccagcacgccctccatcgcacgttggggaagctggaaagagcctggtggctgccgggcctccctctggcatcctctctccctccaaggctgtgtgctccccaccttgtctctccttttttcattccattgctctgttctgtttctgtctacccattcgtcttttcttcctcttctctttctgttgccattctctttctcttctcctctcaacatgtccttctctctacccgtttccccctccccttctctctctcctccctctttccctctccctctcttcctttcccaaatctctcttagccaggctccttttcgccctttgcctctcaaaccctcctccacctttccaccctctctctgcgttctgcttctcccttcttccttccgtgtctctggctcacttatctgccctctccacatcttcttccatttgccaccctccctctctgtagccacacccagtgggctcagagctgggtctttcttttttttgttttttcttttttctttttttttttttttgagatggagtttcactcttgttgcccaggctggagtgcagtggcgcaatctccactcactgcaatctctgcctcctagtttcaagcaattctcttgcctcagcctcctgagtagctgcgattacagtcatgcgccaccacgcccggctaattttgtatttttagtagagacgggatttctccatgttggtcaggctagtctcaagctcccgacctcaggtgatctgcctgcctcggcctctcaaagtgccaggattataggtgtaagccaccgcacccagccagatctaggtctttcatccccctacacaaccctggcctggcctgggcctctggtcttgggcctggaagggagtcccatcctccctccctcagctggatttcttaaggataaaacctttgctccttccttcaccacacctctccacatcccaaactcaagcccacagagcccagctctgggcccagggtgtggacggggagggtggctggtggcccagagctgagccctgtgagtcaacagcatgcctagactcacacacagacacatggcccaccttcagggtcatgaggattcataaaccctattctgcgaagtgcctccaggaatcatcaagggagctagggcagctctgagtctccaccaggcccaccctccgcctctcagggctgagcttcacttcccttcccaaaggggccagggagaggggctgctgatgacatgatctcagaggaaggccaaggcctccaggctgcctctgggcctggcacaggaaggaggaggagaaaatagggagcccaaggaaagatcaacccagcccagcccaaggacccccagccccagccccagccccagctgggctcaaactaattgaaaacagactggaaaaggctgcttttgcccttcctctagactcagcatcatcaagactggagggacagagcatttgaatcatcagacgctgggccagacgtcaccccacgcgttttctcattttatcgtcctaagaagcccagaaggtgcgtaaaatggcctgtcccaaacagatgaggacattacctttctcctcttcctcctcctccttcttcttcttcttctttttgcttcatttttctttcattttttcccccagatgttgcatttcagagaggctgagcgtgttgactaaggtcacacagctacaaacatcagggacctgcgaaaaagctctgttccctggtgacaggtgttctgtgatcctaacacagccggaggtggggacaacgtccttgcagtaacaaaggccctgttgctcaactcagtggacatcaggccctgttttcattcattagcaggtcagggattccagtgtcacctgtgccatgtattccagctgatctacctgcaagcctctactccccattttcccagcagcagccgcagacaccacccaactggcagaaatttcaaacaaggggttctgccttgcactccggtgcaagggttgggcacgtggactcacatgtgaccaatcacattgtctttcctgagatcctgcattttgaccagaggaatcaagaacaaaaagtggtggcaactgatttatccttaagaaatccaagtaatgagttcctgctgccaagatttctgggatttccctggctcctgccagtttctggatttggttcttaagcattttctgggtgtgtgagccccatacccttctcatagcttcttcagccagagtcagtttctggtttttgcaatcaaaaataacccaactaagatttgctatcctgcaggcaagagagggccacagcttgatagtcaaggttagccattgtctgggccctgcctgccccagccagctttctttcctccccagcctgtacctgccaccctgagcacaccacactggtacacgcctgtgtacttgtcttttatggtctcactataatttatttaatccctcattaatgaacatttctaagttgaagtataattcatgtattagtcagggttctccagagaaacagaaccaacaggatgtgtgtgtatatatattatacacattattatatattacacacatgcacacacacagacatatctatatatctagagagagaaagagatttcctttaaggaattggcctacatgattgtaggggctggcaaattcaaaatcggcagggcaagtagtcaagggaaattcaaaattggcagggcaagaagcctagggaaaagttgcaggcagaattgtttcttcctgggagagacctcagtctttttccctgaaggccttcagctgactcaatgaagtttacccatattatggagagtaatccactttcttcaaagactcctgctttaaatgttaatttctttgaaaaaattgccttcacagcaacatctagactggtgtttgaccaaacaactgggtactatggcctaggcaagttgacacgcaaaattaaccgacacaattcacataccgtagcataaaatgaacccttctaaagtgcacaattccatgtttttagcatgttcacaaggtcatcatcatcacgatatagtcacggaacttttttttttttttttttaagacagggtctggctgtgtcacccaggctggagtgcagtgaagtgatctcaactcactataacctccacctcctcagttcaagcaatcctcccacctcagcccctcgagtagctggaaccacaggcgcatgccaccaaatccagctaatttttgtattttttgtagagacaggggccatgttacccaggctggtctcgaactcctgggctcaaggtatccacctaccctggcctcccaaagtgctgggattacaggcatgaaccactgcgcacggcccagtcacagtacatttttcttgccccagaaaaaaaaccctgactcctcccagctcctggcaaccaataaacacattggtctgcatgttgttcatgctggttcaccttcctccttgcctccctttgactgcctcataaatttccactcattcctcaagagttagcccttctgaaatatcttccttgatcccacctactagaagcaccctgtcccacctcaaactgagtcaatcactttattttctgtgaacccccaatataagctgatggtgcctcctggaatagcctttagcaaaagatattaaaattgcctaatcaacttgcttctctttctcaccaaaccagcagttcttaaattatgatttcagggcttcttgacacttaccccatatttttaccatttgatgtgcttgtgtttccgggaagagagttcagggtttcatcagatcttcaaaaggatcccaggaagggccaagagccttgagattagggcttctcgaagggcagaggcatgcttcatgagttcccttgtgtccttatgcctggtgcagatgaggtctgctggatgagcctgggtgatgaatgagtagtcacatgtaggaaaagtgtccttccttcaagggttttccatcatcactctctatgaagcagtgaaaaagcaaaacaaagtaacatacggttaagcatcagaggaggaggatagacacataattacatattcatttgttcatctgctcatccattcacaatttagtgtatgcatctacaaggtacaaagcccagtgctcccagcagcgggtgttcagagctccgagaagcaagcaggcaccacatgttggtctcagaaggtagagagagactgtaaagtaaaccaaggaaggctccctgggggagaggccgcatgacatgagcgaagccaagagcaaggactgggactcagccagatggaacagagcccggggaagggtgtcttgagtgtgtgtgctggggggagcatccacgtgagcaaatgccaggcctgcagaggacccagagaagggagagaatttacacacccacagtccctgaagcctggagaggactttttaagattcccggtgacggtgcagagaagctgagccggggcctgactacagtgaggtgtggggtgtaattaccaagccagagtgcagagctgagccaagcaggtaagagtactgaccccgagcccactcgggctctgagcagaaggaagatttcattagtgttagagaggaaggatgtgccttctcccccggaggccagagggcaggagaccagccaggcggggaggctgacccaatggccccggaatggtgatggagcagcctgggaggctgcaggcactgaaggaagaggtaggggacgatgactccatctgtcacctcggcacttaccccaaaagatggaggactgctggcagaaacagacagaaatttcccttgagaaggagaaagccatgctataggcaatcaagatttgcacattgtcagcagagaaggaatgagactgtctggttgccgctagactttggccagggctgtcctgcaggtaagggcctcgtgcaggaggcccctgggcaagggccggcccttctcctctccctcagtgtcctggaaaggccccagggctgccccaacccctgacctctctccttctttctccatattgctagacccccttctcttggtcccctgcctcctcccactggtgtgcacccacaccttcagacagttctgagcagaccacgcaaaatacaactgtgatgttatttgcagcaggcattctggacccagaactgtgcttggtcttgaagttgaaaggtagcaatcactcatactcctctcccatgaacaatttgagaaaaaatggaggctcagggcagaagttaccccctttacaactgacgggagctatcctggggaatgaagcctgaggctaaaacctatgccctatttccagcctcatgaagtaaacttagccactgggtccctagcaaagaaactggagaactgagggtctcccccaggtctgccctccaactgccccaagccccacatgcctgcaggcggccctgggatatctgccatgtgcagggaataatgagcctggcagctgcaagaaggagatgagctccagggtttgagggttaaggacattcaccagtctcccagcacactcatctccaccccaccccagtgaatgagactgagagggctcaaggtgggggcaacaggttctctccattaccttccagccaatacctgcatgtacattgagatactcagtaagccatgagaagcgctgtgtgaccatgactgagttgtttaaactctctgttcatgctcctcccctgcaaagtgaaggcattcaaaatcatctgtattcatggtgaacctactttgttctaaggcctctgggacatccaaagttggataggccatgtccctgacccagctgactgctctcacccttgctttcactgtgtgaaattctcccacattgacgggctgggggtagggcaactacaattgagaagcacaagggagccccccgtggtgatgaaacagttggtatcttgactgtggtgtttacacaaatctatgtgtgtgataaaatgacacagaactacacacatacacacacccataagagtgcatataaaactggttagatccaagcaaggtgtgtggaccatgccaatgtcagttttttgactttgacattgtcctgtggttccctaagatgttaccactgggggaaactgggtgaagggtgcaagggcctctcagtattattatgggaattttctgtgagtctataatcctttcaaaagaaaaggttattaaaaaatctcacatgacttctcactactctgcttataaaatccacactcctcacggagcaccacaggcccgctgtaatctggcctctgtctcctctccaacctctccccaagctccctaggcccagccccatccccttctctctgcaccttgagcacacccagcccactctgtgaggctgtaggccttgctgtttcttttacctcaagttctctcgccccaaatcctaaacacaagtaacttctgtcattcaaatttcacaatcagtctccttttcttgtaaggccttctttctcaggctgatcccttcagccctaatacagttggcccttccactgtgtttagggtgctacatcaccatcacctcttggtttttggctaagatcaagtgtagagtcctgctatcatcagacatgatctgattcgtttgtttgcttacctatcactgtcagtccggacctcccctccctctgagaatgaagcagagaaaatgttatcttggtcaccagtgtatcctggaaactgcaacaggggcaggcacaggcaggagtgcagtgaatatcaatggtagatgaatgaatgaatgaatgaagaatgaatgaagaatgaatgaatgaatgcaccacacaaagtagcattctagcagaagtgaaaacaaggttacctagtgcagactttcccagccaggactcatactatttttaaacacatacacctgcttcggtgatgtactgaaggcctcaggctactctccccgcccacatctcccacccctctaacaggattcaaatctccagtgctcatatttcctcctcatcacttacctagcaaatctggctcacagtataatatcagtcatttatacttcagtctgaattccaggtcagtgccaacttcctccagatatttgtggtttaagcttcatgtgatattacgtcatcttaagggcatttagtaaaggggaagaaggaacatttttggacagaggccttttcctgtgctcatttgtgcctcacaggaagccaagagtaaatgtgcatctagacctacaggggaggtcttggcagttacagcaaactcagggaattttaaatatgccggaaactttccagagccctgagttgcagtcccagctctgtcactgtctctctgtgctttgctaaacagacttcgcccctccgtgggccgtctgtgaaaatagggcccagctcgatggcatataaaggccctctgacttccagtagtaaaactctagaggagcccttgttttctggggagactctttctgagttttcataataatgttgagtagttctcttttcttgctcacgccgacttttctccagttctcggacaccagttctgggtacccaacaattcaatccagttctgacactaactatccagagttagcagaggccccacaggttaaaggcctcgtcccacaaaactgcccccacttcagacaccagtggccagtctcagaccccctgtacttctgaccaaccagctataagtcaaggattcctaagactccttcctcaggtctaataatttgctaaagaagctcacagaactcaggaacacactttacttatgtttactggtttgttttcaaggatgcaactcagaaacagccaaatgaaatgactgaatcaggcaagatatggggttgggggatgaggcatcgagtttctatgccctctccaggcatgcctttctcccagcacttggacgcgttctccaacagggaagctctccaaatcttggtgcttaggggtttttatggaggttcaattacataagcatgattgatcaaattattggccaatggtgactgactcaatctccagcctcttccttctctccagaagttggggatggggctgaaagtctcaagcttccagtcaaggcttggtctttttggtgaccagcccaatcctgaagctatcaaaggctcaccaagagtcacctcactggaacaaaagatgctcctataccctcatcactcgggaaactccaagggttttaggggctttgtgctaggaatgggagacagagaccaaatatctatctatttatttatttatttatttattttttgagacggagtctcactctgtcacccaggctggagtgcagtggcacaacatctgcctcccaggttcaagtgattctcctgcctcagcctcccaagtagctgggactacaggtgcccaccaccatgcctggctaatttttgtatttttagtagagacggggtttcaccatgctggccaggatggtattgattccctgacctcatgatccaaccaccttgacctcccaaagtgctgggattacaggcgtaagccacctcccccggcccctttctatgacaccacagatgggcacagtcagaatcagagcctgaggtgcaggtcaaatcccttagccctccaccagtcccgcccacttggtttctgtggtagaaagttttgtttactatctgtatctgtatcccccaccaaatgcgagctcccccatcccaccctgatgctgaactgaggacactcagggctttgtgtggctctggcagcttgcacaatgggttctcagatgaggtattccatgcccttcttcctggagtagtaagagtcaatgcttttcagttcagcagaaattcatgagatattagaaagcacttcctagatctgcgtagaagttggaataggttgcatatagaagctaggaaggttccatccctggagatctttaggaagatcccattgctctgggtgactcagtcgctcatttcaatcatgaattacaggcattatcgagttaagtcaccatggtggctggacctgctttctccaaagtccctccagctgcaggttggtgagcccatagatggggttagtgaagcattgttggtcagctcaccagggcacccttatgagagtgaagtagaccgtgactcctctgcagttggttaaggaagaggacactgaacaaagtcatgtgttaagagtggtgtttggctggcaaattctgattcatctttcaggaccctgctcaagcatctcctcttttgagaagcctggcctggccctctccccatgccccactcttccttccccaggtttaattaaatgtctcttctcagctggtgtgacctcttggttgattgcaaatagtgcatactccactctctctccacggaactgtgagctttctaagggccagaaccatacccacctcatctctcactgcctccctggtgccatcgcaggacaggtggggcagagcaggggcccggtggctgctggctaaattgttggagggactggctgggagcccatacatcacagacagcagataccccagggactggcagtgtgggaaccaggtgagaagccccagtctcaggtctgcagccttcctcagtctcctcactcagtagccttgattcccagcaaaccacatcaatttctcattgcacaccctgctcaatgctcatctgcatagtgtcctccatccagagcagccctgagctgtgggcacgaatactaatggatcatgcaaatgccagcctagggcaagagtgccctggactgtcaattagctccccccagcaccagctacagtgcccaaccccttcacttgatacaggccagcccaatgcaagaaggagcaacagaaaaagaactcggcttgaaggactgctctagtcaaggtagtgtgttgtggcagcctggaaagggatcttccatgtagagtgagggaagaagagagccagcctggcctctcaggaagaggttcccacaggcactcttgggaggaaaggtggtgctcttgggggcccaggtaataattgctacacgaatgccacggctcttggaactgctgcttcatccttttccctccacctggccatctatgtgccaggccaccagcgtacgtcctgtgttgtcctctaaaccaagaccaaagctcttcacagccactcttctctgacccagtaccaactccatcctgggagggaggatgacaggctccccgtcccctcacctcttcttcccaatactgctgtttcctcccagttctttctcttccctccactgctcccatctgctttccttccttagtggataaaagcattaaatttgaaggcagagagatcgggttcaaacccagactctacagatcactcaagctttgtggcttgggcgaattacaccatgcctctgaacttcagtttgctagtctataaaatggagaaaagagaagtacctgccacagtggcattgtgaggatcattttatgaatagctaagaatttcaggtaactcactctgatgtaccagaaagttactttgcttactgcttcaatcactgaacttaatttctactccaagttcccattcctctcagtggcagagaaccctcaatcagttcaggatgccccatccccagtgttgcctgaatgttttggggtgggcttacggagcatggagcctgaagtgggctctacctctggtgggcagccctaccattcctacagaaaggcaccccaagaggttctgcttcctgtgcattctgtggtcactgtgccattcaggtcgcagctggggcctcccaggctctaggagggtttcctggaccgcaccactgttgggtgcaggggaagattccccttctccttaccggacttgcccaggagaggtaggtcaggaacccctgcctgaaaaagacacacaagtcagtggctgtgcaatgctcctgctacacacagaggtggcaggccttagaggggaaccctaggctgtgttcactctcccaggctccactttggaaaagccagggtctgctctcagctcccacattccgccaaagtctggggtttcagtgccaaacaggccaccaaccctcgaactctgcctgaggtggaggacaagggcaaacccctcttgctcctgccctccaaccagtcacatattcttccaggcctttcatctcaaaatccaagatgtgaccattgtttccgtgccacctctgccacaggtagtgaatgccgcagctcaaatgtgcggcaggttgtgtggtcacaggaaataacagaaggagccccggttaatatctcagttgtatgtggcctcatttttgcaggccctgtcccagagtcagtcctcagcacgagggcagctgagactcttttctcccccattccttcctccttccctcttcctgggtttcttcctttttcaggctccaattgcagcagcagcaatgctgggagcggagatcctgggagcccggagccagctctgacatgttcagcgggccgtgcagggtcaggggcatgctcatcggctcatcactggcatgattactaatcatcaggcagcggcagggttactgttccctcctcccctccctgctcacttcctcagggtcttcaggctgcaggagccgaagagggaaagaccctgcgtgcaccctggcaggctgataatcacagctgcagcccccaggcactaaaaggatgggtgggagcatcatccaccactcaaagggctggggacccttgtccctcccatgtgcatccatctctcctatctctgagtccccagtgaactgctgcctccctagagaaacagtgctagaagtcagtggcaagagcagcaggaggacttggagctacatgcagagtgtgagctccggagtcagaccagctgagttcaaggccagctccaccatctattcactgtgacttcaggaaggttgcttaacctctctgtgccttagctgcctcatctataaaacaggaaacaatgagagtctttccttatggggctattgaaatgattaagtgagatcaggcatgtgatggcacacagtaagaactccataaacagaggtcaccactgctaatgcaattattctatcacctcaggagactaaagcaggggaggaaacaccattgactcctggacatttacccaaggagattatggatccatgttttgcacacactttagaaagacaaggaattctaaccacagcatctgtctccactgcccccgtcatttcagtctcacccgtccaccctcaacctcaccactgtggcccggaaatgcggttgcccagggccactctcaccccacctcagccctgctctgctcaagtctcacttccactccttccagctcccatccctttctacccagctccaccctgatttctccaccatgacctttaccctcctagtctgatctagacccctgatcttgccgagtatctaggactttggtgcctttgaccctcagcagcagaggtagagagggatctcggtgaagtctgggatgttatagtgacttgtttatctaagtgccctgagactgtgagttccctaatgcagggagcatcaacctctgcagagagccccagagccctgctcaggtgtgatgaacaggaggcactcacttgatgccctcacaaagttgtgagtgaatgaatgaatgagtgaatgaatgattgaatgaagattagtgattatgttaatgacctgcctttttcatgagccttgcaacctcccaggtaccacactaaagcacttaaatgcttccactcatttaatcctcatagcaaccctaagacataggcgtaattattgtacctattttatagatgttgaaactgaggatcagtgaagttaaaggcacacagctaagggatgaatggataaaatcctttaccataacctttcctccttaggacaaagtttcttcaccaactgtccaaggctgtgtttcactggggagagtctgaaattctacaccaagcatgagcatgtgttcatgcagcatggtaactctgggggaaaaggttcacaggttttatcagatacttacagtttgttagaacatatttgaatccatccatctaaccacccgtcccctttcaatccacccttctgtccacccccagacagccatttgatcaatattcatgaaatatctgccttgcgccaagcatagtgctggcacccatgaattccctggtctccagaaatatccttccccctctccctgactacccctgcccccgcctcaccacacacacactccttgcaggatctgggtaactgggagggctttaccgccagtgtcccagctgcgtgggtggctgcactctgtctgaactcatctcagctctggtggagactgtggcagcgcagaagcgtgcagggggaatcctcaggcagcgcagccatcaggacatgaagggcagagcctgtgccccggcttccccggcttccgctgcagtctacatcagtcctgctccctccagaacatgatcaaccgggacagatgaggccatgcttgatgcataaggatgcagccagggagagctgcctcccaaacccaagtcctattcaaaggtcttttcttcctcctggggaggtaggggagaaggtccaagcaaagggaactggaaggggaaagtgaggcatggagtttgtgttttctgaatcaggactgtgttccagccagggagaccctgtgtcaggcacttttgtaatcacgatcactttcagcctcaccctgcgacctccaacgacattgctgagattgttctccttgcaaacatgaggaaattgaggggctcaaaggtcaaataacttgcccaaagtcacaaaacaaatccgggactttaagcctgatctgcttgacctgaaactcatatctacttccctgccctctgaagatctatatgtcctatgtcatcacttcactgttcacacaaggtgatacctggcttctccaagcacctgctaccctgaacttactgcaccactctttccttcctagcctgaatgcaatttgcaatgaggagatgatttgattttcttcagccctagacctccagcttcctgagagcaggtactcttgcctcttcttgctcattattgatccatatatttagaatagcgcctggcaggtagatggtgcttaataaatattcattgaataaatgaatgaatgaatgatccaatgagccccaaagcaaataacaataaaggacatttgcagagtgctctacagagagacaagtgctttccctttactttatcttaccccattctcacaacaatcccctgacatgattgggttcatgtttcacagatgaggaggctaacggccaggtgtacataccaggggacatgggactgggttcatatgagctcaggggtaaatgatgacaccctttcccctgccctgaaggatctcagtttgagtatttgtagcacacttaggatgttctgggccaggctgagtggcggtggatgggggcggtggaggtggggtatgcaaagcaggaaactcggcctttgctttctaaaagctcccagtctatttgaggccagacttatgcatgcagaacatttgggaaatggtacaagacagcagcaagcatagtgctgaattgcacataatcaggtgccaactgcattcccttccttaactaatctgagtcttttaataccagatggggaccctgagaatagatttcctatcaaacagatgaagagcaaagatgggagccgagggaaatgctgtggcttactcatttttatacccctgtaacccagcatgatgtctggcccacagcaacaggaatagggcagtccaccttcaataatgggccactctatgtgccaggcacctgctaagggccccacaaacatcatgtcaccaatccctcacagcaacactaccacttactaaaggaattatgaaagtaatccacaagaagctgaaagcagggttcagagatcgtactcatcatgcccacagtctcagagtaaaggggcaagctcagtgtttgaacccaattctagcagcctcccaaattaatgctctcaatctgactctatgctacctctgtgcctggaaggaactactgttgtccataaggatgagaagaaacatggctaagggagcactgagtagggaggaaggaggcagcagggaggaagaaataaattaagaaagaaagagatacaaagaggaagaaaggagagggggagggagggaaagaacagggcttgtgtgttacataaactcagacaagcacatgcatgttttaacaggattcctgcaggtctgacaatctcactccttcctccctgaacaaccttagaggggttgcctaaggagtcctatatagaggcttatggcagaaggaaggccttgcgtccagaactttctgagctcatggattgacactggggttgcgcatcagtctgcttggaatgccttcaaaaaataccccagtctgggtggcttatacaacagaaatctattttctcatggttctgaaaactggaagtccaagatcaaggtgccagcagggttggtgtctggtgaggcctctcaccttgtgttgcaactgccttttccctgtgtgctcacatggtatctttgtgcgtggggggtctttggagtctctccttgtaaggacactaactctatcagatcagggccccacccttatgacctcttttaaccttcattagttccttagaggtcccttcttcaaatacagccatacaggggcttagagcttcaacacagggattttggagggacacaaacattcagtccacaccggggtgcatgagggaggggtcagagctggagaaagtgcatgagctagttcaccttccagagtaaagggagcaacagccactgaagctcaggttggatggggctggcaaggtcgctgtattgagtacatcatgggagggacaacaggacaaatggctcctgcagtcagggtgactgatgggaggcttcttcagcactccctctgcacattcattttgtcactccctctctccccatgcagttctttgctctctgttgcaagttcccaggaggcaggcagagggcctgttatcatcatctttctctcttgcccctcacacttacctgtgttcttctacttagacacattctttgtgagcatctcatgggtgatgttggctgcattgtacagtgggcacgtgcgtatgtgtgtgtatttatctgcaaataatacccatgtcacaaggcgtccgcaggaataaatgagctattgtgcatgtaaatatctggtacatggtagatacatgaatgaatgaatatttgttgaataaataagtgaatgaatgaatcttcacttggcagagcatgtgtcttcctttaaggggcaaggatgatctggtaatcatcagtttctgcttactaactgggtcactgagcaaagaaaagagactcactcattcatttattcagcataggttggctgcacccctgtcagaaaccggaggttaagcagaaagtagagagttaaatcagtatgtaaagcagttaaaacagtccagagggagagacaggcaaggaaaggaacaatgagaaacaaagtaaggagtgctctgataagaagccctgggtgctatggaaaccacaagcagggcaccgactcagggccagggagggatccctggaggagatgacatctgcagtagatattccagggtaagcagcaggtggccagaaggagaaagaggtgaggaacattccaggcaaggggaacagcacgtgcaaaggccctgaaggagaaccacaacacgcatctgagaaatagtgaggggtctgggtggctgagccacaaagggaacaccaggggtcagggaggatttgtagaagaagccacaggccacaaaaaagacctcataattcatgttcaatggtttggattttattttggtgacttcactttatacctactgttcagaggcagccaattgcaaacacgtccagaagcactttgctatttctgatctgcaaaatggagcaagtcatctgtactctgcttcttcagtgggttgtggggaagcagaaatgagaggatgacattctagccttttgtgacctctcaagtgctgtccttatggtcattcaggtaccatgaaaattagcagagccccaagggggaagtagcttggtgctcacccagtggtatccctgacaagttggcaaagacacccagggtggcttaactttctcctcagcaaagagctctcctctgttccctgaatcctggatatcccactgggtcctctagtgaccccaagcttcagcctcgcatgccctcttctcgaacagagaaggcaggagggaagcagggaccagcccctgctccatcttccaggattccaggcctccctggcctggacaagccctgagctggcagttaggagagcagaggttgtgaatctggtgggacccccagcaggtctttctggctcagtgccctcatctgtgagcaggggttccccaggagaccacgacagaggcctggaacccaagttctaatcccacatcctggctgggcaacttcaggcaaatttctaacacaaggtaagcctcaatttctctctggggtaatgatcaggcacctgcttaattcacaggggtttggtgggcatcacgtggacaatgtggttgcacagcagtgggcaatgcaaaggaaaggaagtatgttagtaagtgcccctcccctgttgcacaaaacaggacacatgctgggattgcagaaaagcaataaatgctgcacaggtgaagaaaactattcaaggaccctggccaagtcacaggctacctgtggccctgaggggacagctcatgggttggcattaggggaagcagctctcaaggggcctgtatcctggggattcaactctgtgcctatgtggcattgagcctgtgtgaatgtggtgactgtcatgctgttttgctgtgtgtgcgtctgcatgcctgtgtgtttgtgtgtctctccaccttcgtggggggcaactgtaggtgtattatgagccttgggtctgtctgtgtgtacaatagcaatgtctgtgcggacttaaggacctgcgcccatatgtttgtgggactttctgggcatgcatgcttgtttatgaggccatacatccgggtattctgtgaactgctagcatggtgtgtatctgtgtggcagacagaaaatggctgggtgggattgtagggggcagcttgggcaaaggatcctcagtgtcaatcaaaatgggtctcagtgggaacccaagcagctcagacttgggggaggggaagctcttcctccaccttccagggagcaaaccttgcaattcaacaccacaaggctttgagtccacaggcagggacgcaaactttgcccattgggtgagacgccactcacagaagggaaatggcttcctaaatctaatcattgccccttcaagcactaacaacccgtgcccaggagctgatggctaatgaattattgagctggaaagggagaagaggtagaaccaaggaggaaagaaacagaaaaatgagagagcaggccgggtggggtggctctcgcctgtaatctcagcactttgggaggccaaggcgggtggatcacctgaggtcaggagttcaagcccagccagcccaacatggcgaaaccccgtctctattaaaaaatacaaaaaaatttagctgggcctagtggtgggcgcctgtaatcccagctactccggaggctgaggcaggagaatcgcttgaatctgggaggcagaggttgcagtgagcagagatcgcaccactgcactccagcctgggcaacagagcgagactccgtctcaaaaaaaaaaaaaaaagaaaaagaaaaatgagagtgtaagggcccagaggggctgagggctcctttctcctccccaactccctgtcactagaaggtgggccctgccataggaggattctgcagaaccctcaaggacccgcggagcaggacggcaccttcttcccatgaccacccatttggatgtgtttttcacccctttctgggtggggcagactttccccctccccatgagttcaggcagtgggttaaataagatttcccttgaagtcgaatgaaatcacaatgcaccacacacagggacacacacacacacacacgcacgcacgcacatcacacacacacacacacacacacacacacacacacacacatacacacacacagtctccctggggccaatctactgccccctgaacctcacccatcagccaggtgcctggccccgggtctgtctcttagggttacatgctcccggggctcccgcacataccccggcagatgagggtgcgcaggggtgagggcgcagggctgggcgtcccccgcccccaccgtgcagccctcgcccccgccccgcccctccgtagttgcccgcccgccgccccctccgccgccccctccgccgctccgactctcgccccgagcgctggcagcaggcagcaggcagcaggcgggcgcgctgtggctccgcgccgcgcggtccgggctctgttcattcatgattggtactcggccctccgagacccagcccgagcgcagggaggggagccgagtgtgcggcaggaggggcgggcggacggcggctcccgcaccgcacgcggcgctggctcggcagcctcggccgggcggccgctctggccccgtgtccagtgccaggcaggcttcagggcaccgtcctcggccctgggcgagggaaccgccgggccgggtcctcgcgcggggaagcggttccgaaggctcgcggggagcggctagccctgagtccctgcatgtgcggggctgaagaaggaagccagaagcctcctagcctcgcctccacgcttgctgaataccaagctgcaggcgagctgccgggcgcttttctctcctccaattcagagtagacaaaccacggggatttctttccagggtaggggaggggccgggcccggggtcccaactcgcactcaagtcttcgctgccatgggggccgtcatgggcaccttctcatctctgcaaaccaaacaaaggcgaccctcgaaaggtaagccaccttcttccttttgttcccctgtctgggcttgggggtgctaggcgccgaggtgggctgtgccacctgcctcccttagtccggactctcctctccacgaggagcccggacaggtgcttgtatccaaaggagagagaaatcggcgggagggctggtgtgaacacccagaggagggagccggagtggacgtctgccccagcggcaactggacccctctggggcaccaggtgtcgggactctcctcctggggaaatctctgagagccgaaggaagcggcatgttcacaggtgggggtgaccggattctctggtggaagtgtggtgaagctcttcccattcccatgacagctggcgtttgagcactcagtgagggtgctgccacactcccacactcctcctaggcggctatgccaggtgcagacctgcgagtcccttcatcaggaagagtgctctgtctgcacccccaaaacctctgcaagccaaaaggaatcagctgctgccaggggtaaaactcccaggcctcatgtcctggtggctccgggagtcaggaggagcaaccgtgaagggctggctgcgagctgagcttacatcaaggattaaaaagcataatatcgtggagtctcttctgcctggacgctgttccttcaccacctgtccccagccgaggcatggctgatctcaccatccgtgggagagtcctcaaatgggtccaggtgaagttggaaccagtgtgttgggccctggaggacaatgcaggtctccttaccagcagttcaaaagttagtggttggaataaagagactggaagcagttaggaaacgggaaatgatgggttttgttttgtttaatgttcaaatgtcactacgagtggtaagattttaagcagcttgacacttaaacattcaaattctaccatcagagcccccatcctggatacaggtgggagttaagctcctaccctacaggcctgatagtgagtagaagtgtaatggggtaagggaccccaagtgaacaataagtctcctcttagaacttggttggtctcaccctgtttagaaccacagagatctccataagtaagctgtccttgaaaccccctggaagaaggggtcccagcttctggcccagctcccaggggcatcaggctggctgagccccgaggaaagagatctctgggtgcagatcttaggtgctgaagctgggttggcatttacatcctagaacataggaagaggctttggcccatttgtccagctgagttacatgtcctgctggcaaggaagggactggttgtcctgttaccagtcctgaccagaacaggtctgcaaagctcagcccaaggccttgacattctaagcctcacctctcacagatcctgggatgctgcttgactggggacaattttcagcgccaaatataggtcttctccctcatcatctgtctgaccaccatgcggtctcagaggccaggggactgtggggacaggaaagtcaggggcttgtttttaaatattttcaatgcctgtggctctcctgggagctgggtgtcacagaaagatctcaagccctagagtcaagtggagtctgggtgtgaatcccagctccatcactccctgcctctgggaccttaggaaagtcccccgcacctccctaagcctcagtttttcatccatgaaattcgtatgctacttcccggagggaagggtatgtaggaagtagaggaagggaagactctgcctcatatactgtgttggctgcagccaccagggacccagaggaagttgttgtaaggatgtgagaatcaaatgaatgatgaatagggagctccgtgcatagggctgggaaaagagtaagagctcagacattgctgtctaccatttccttctcctgccccaaacatccaggaattcaccctggatgaattcctgcaggattcccagagtacaaaggtctttgcttctgtctcctcggattctaagaaacagaagagggggtactggcattcagtgtgtccctactgtgtgcttgccataatgctcggtgttttatcaacaactctcatttaaccctcacaacaatgttcgtttgaggctcatagcaggttcggggccaatgggtggactcccaagacaagctatcgaagcactgggcactcagcccttcctgcacaaagcccactggcgtgagttgtccaggggtccagctgcatatgttcccccaggtatttgcccccgaagcacagtcatctcactgccttgcatagtggaatgctaatcagcagaagacccttctatgggaggcagcttggaaacctggaggaagccctggctgaggaggctagtggtcagggagcctatcctggccaggtcacttttccccactggggcctcggtttcttctttgtaaagggagaaacttacattaggcatttcctcaggttccatttggttctcaaattctaatatttttatggttgatgctctcaccagagctgctgctatgatctcagagacgtgaggctcagatctaattagaagcaaccggaagagagcagttgggatttttcaactcaggaatcagtctccctgctgggttcaaattcaggctctgccacttactagctgtatgactaagccttgttttcctcaactataaaacagagatagtagtagttaccatcttaaaatagctgttgtgttgtgtggatttcaaggatcatgcaagtcaagcatttagcacagtctctgctacataagtggtcagcaaatttgaggtactattcaatttatggctctattgtttggggcttccaaatgtccagagtaaggccattttcgaagtaggcagtacatctgagagccttaacagctcatttctggaaaccttatccagccctatccagataactaggaccaaaaaccccagcacacagatgctcgtcccttgcttcaaccctcactgacctctactctgtggcttgtcctgaaaacatcaaagcctgctcaattaaaatcctgaatgccttgataatacaatttagaaacatacatagtttttaaatagggcaaaaactctgcatgattagtgctgcaagaagatatccagcccaacctgggtgttcagggagcgctctctaaaggcaacagaaatctaaagtaatttaagagccatgccactgaataaaaatattcaggttcatttcctgtccttctctctgtttgggatctttgtgtgtctttaattaaaagtaggagagccctgcttttgggattcagcctctgcatcccagtcccagatagaatttctgactctagcagttttgcatgtgcatgacacaccaaggacactgctcctggccttgaatgggtaagtgagacaggctagggcattgaggagaaccagaggaggaccatacaggtgcagctgctgggcttgtcagcggggcaggagaatttagggacaacatcactagaccaaggccatctcaacagagaattgcctagaagcaaataatcccacactacaggggtggctgggttagaaatcctccatgaccgagtgcaagcatgcagaactttctgaaagggctgagcttcggatctccagaatagtcatagcataggtgagctatgactcaaccccatggctatcagatgctttttctaaggccacacggtgagttaatagggtactggttaatatagggccaaacatgggaatgttcccgatagtcccatatttgctcctagatcaatgagcacctcagggaacttatggaagcagagtgtacctgatgagactgggtttagggtttattggtcagggcagcattttcaacctaaagatatgggagagtgacaagagacagacaggcatagagaagcagtagccgtgttgtcacatagtcctgagcccaaggggcaggcctttggcaagtcatttcaccttgtaaatgctagtttctttatctgcaaaaggagaatcctgatgtatagaaatgtttgtgctttggtctttacccatctttgcatctttgcctgtccctttaattctataatgctctcccaccccaccccttgctgccttgtctaatagttaaaattccaccgacattccaagacctcactcagcaatttccatattcaggaagccttctccaagccccagagagaagtgatttctcccatctgaattcccatattcttttaaggtgtacattttcttatgactcacaatcgcgcttggaattagacaatcaacggaggtgttaaccccctttccccaccaccagaggtcagggttcttgggggtaggagctcgtctaactcatccttcacaactctctgcttggttctgtgcacatagtaggtacttaataaaaattttcctagagtaaactataaataatggaatggttggccactctccattatttgctagaattgcagaccctgcaggaaaagttagcttcccaccggaatttcagttaccagccctctgccaggaatgaattctgttgttcggtctgctggctttgaattgactttgtccatgaaatgtaccgaatctgtttaccatttagcaggaaagtgctgagaacagtgattctactcccactccctcataatcacaaaggtatgaggaacccacacccagcaccaggcacagttctggtccctcaatcccagaagaagctcaatggagctcaagataaacagaaagagagagatggaaaagaatggaagacagaggagaaggacttactgcctaaaatcagtgggattgttttgacttggtctctggaaaagggccaaggcttagacctctttgtctgcctggaagggccttgctccatgaatgctttgtaaatctgtaagtgaataagtgagcatatgctttaacaaataagtgaaaagatgaatgattgaatgaatgggggaagcagtaaaggagtgaatgaatgaagcaacaaatgaattatcaactgaatgacagaaagaatgatcgaataaatgaccacatgaatgaatgaatatgtccataaatgaatgaatgatgaagtgccagaacagctataattaacagcctatcttttcacaaagagcattgatagtcatctccccaaagttgaaaaatataaattcagtcaagaagagtcctggtaattttttggatactggtaggtgtatagtgtctttggagaaggtgaggagatgtctctaagttttcactcttttgctgaaacaaaagcagggactgactcacagtgattccccttgtcttcccttatatttcaggttcgttcacccttgcctgggtgagatcagaatctgtatatttatccactcatttatttgttcacttagccagtcccacaattgtccttcagcattgcttccctgcctaagatccactctggcttcctcatcctccctcttcctccatctcctcattcacctggccaactcctacttatctttcaaggcctcattcaatgccaccgctctgggaagcctttcctggcttctgtaggcagagcacatctctgccttctctctttccccatagctgctgctgcttcccttaactacaattctgaacacactatgaggttgtcattatgggtttacacatttatctctctgactagctttcaggcactgagtcttatcccagggcctctgtcaggcctgacactgcatccaggcttgatggatgctggcggcatggaggtaaggatggatgggccagagtgtgcgttcttgatggctctgagcggtgtgagaatgcggcggtgcagatgaggaatccaggtctgctcctggggagaagctctgcaaaattctgcataatggccgtggagctgatgttcccattcatcaggcagggaaggaacagtttttagaaaagagagagagagcctaagagtcctagggccttcagagaaacatctctttaaatgcttccccttcctccgggtagtattttaaataggtcaccttctggaagtagtggtagtcagttgggatattgctagcttcccgtaccccagccatgggagtagtactttggattaaatcttgttattcaaggccagactaaaagcctcattggtgcggtggggggaagtaggaaccacattccactcaaatcaggaagctagaagtaggattgcattatggctatgagcaccgcgttaaaataagagtcttgggattgaactccctttcattggttcatagctgagcctttccaggcctcagtttcctcttctataaaatggggacagtgggccaggtatggtggctcacatctgtaatcccagcagtttggaaggtcaaggtggacagatcacgaggtcaggagttcaagaccagcctggccaatatggtgaaaccccatctctactaaaaatacaaaaattagccgggcatggtggcatgctcctgtaatcccagtcactcaggaggctgaggcaggagaatcgcttgaaccgaggagacggaggttgcagtgagccaagactgcaccattgcactccagcctggatgacagagcgagactccgtctcaaaaaaaataaaaattaaaaaatggggacaatgacagtgtctccctatagggccacgtgagggccaagaaggaattgaacatggtgctgcacaccaggtgagttggcagtgctggctttgctgctgccttttgtcccatctcaggacaggccccttccttctgccttgctccacttggatgatgacggtgttacccttggtaatctccccatccctttgagctgtggcctctgattccagccctctgagatcccgagccaccatatccatggtcactggcattctaagcagtttctctggtgattcctaagggaagctgtcaactttagatggtaaaagcaattcccaacagtgaggtatgaaaatgcaggtcacccgccaggaaggataataatactagctcaaatgactctggcctccacccagtgccaggcaccttgctcggctctttcctgtgttattttattaaccccaaccctggaggacaagatgctattacagttctcattttgcagttgaggaacctgaggctctaaaaagggaagtgccttactaagggtcatagagcttgggaatcgcagagcctggttctggttgatcccagaccctgagcttctaactgccatactaacctcctctcctcctggctttgcctctggaaccttagggacctgagtagaaaaacagtcaaaacgggtgcatggatgttggggagaaggcattcaaggatagactgaagcacctcattagccacacggaacaactgagctacgtgcaggccctgagcaaaatgcttttagccccatcccaaccccgcctccccctagatctgtttccatttcatctgacactgtggaagcctgaatatgaaatgattgggggcagaaggccaattagcaaattcattaataggattaaacatctctcctctgctctaatcatttatgtgaactaaaattttctctctttgttatagccatcattgcctgtcagtgaagatagagtgtttaaatatcttccaagtatgttagaattgcaaacgttcagaaccagggaccaggatcagagttttcacacggtccaggtgggcaaggagatcagtcggtttacaagtggttatcactgctaagaaaaaaacacaagaacttgctagtacatttgcaagtaccttactgctcatctcctttctctccttagccacatgttggcccaaatcacctgcgtatgttatacggttgttatgagcatacactcctggttaggcagacctagaattcaaatcctggctctgcaactcattagctgtgtgacattgagcaggttacctcgcttctgtgaactttcatctctacataatctagaaaatgaaagtattgttgataattccctcccaggttgttatgaggattaaatgcagtcatgcatgtaagatgcagcggtcagcactcagaatgcgctaaaggtaaattgttactatctgggtctactccacttaaagtgtgctcctccaaccaacagcctcagcatcagttgggagcttgttagaaatacagagtcccggccaggcgcggtggctcacgcctgtaatcccagcactttgggaggccgaggctggcggatcatgaggtcaggagatagagaccatcccggctaacacggtgaaaccccgtctctactaaaaatacaaaaaaattagccaggcgtggtggcgggcgcgtgtagtcccagctactcgggaggttgaggcaggagaatggcgtgaacccaggaggtggagcttgcagtgagccgagatcgcgccactgcactccagcctgggcgacagagcgagactccatcttggaaaaaaaaaaaaaacctcaactcagtgagacctacccagtcagaacctgcattttaacaagatcaccagatggtttatatgcccactggagtctgaggaatactggcctaaagtacagattatggaactatgtgtattgtattacacaaaattatatatcaagccagaagaggcttttgctaagacttctgatttaagcctcattttacaaataagaaaatagaatccagagaaggtgagtggtttgcccacaatcacacagctcaagtgttaggcctgacatccgaaccccagccctggtcatctcatataaattgttaagaagtcagatttccagatttgcatttctgcaatcaagcttgtctgtttttctttctctctctttctttttaacaacaaagaagtgcaggatgatgtacgcccattaagttttagtttactcattttaaatgttattccagccaacagagatcctgaatcttgactccaccagccatcatcttagctgtacctccaagttttctgctacctgaagaaatgataaggaggcattctaggtctttatctaagttgcttctaagaacatgggccagaacagggtgcaggacagagccatgtggactgcaactagagacttgcctgcataatggatttcactgataatgttcagaatcccagagcaggatggcagcctggtttacatacagagcctttgtgtgggatttgaagccagaaaatgtgactaaagtaggagtctaaacagacacaggtagggcctggggaatgaaagtcaaatgccttttccagggggtctagtaggacctctctgttggtggggatcccccaaaaaagtaatctttttatttttgtaggagtcctgtaatggtttcattattattctcactttgcagagtaggaaacgtagatgcagggaggttcttgattggctagtgattagtaagcaaggacttgaagtggatctgattgcgaggcactccaccacctgggctcctgcctgcagctggagggcatatccaggacaagcaagcctctgagccccaggaagaggctgagcagttacagctagtttcccaactcccaggaactgaaaatgacagcctcctcttggccccatcagctcctcacccatgccaaccctggacccagagtgagggatgttctggtggagaccatgaagctcccagctgcctgggggaagctggcacatttgcatccgtgtggctgaggctgcactttctctccatctctgggattcgcccatgtatgactctcccagatgtccaaattgtgcactcagcaggggtgtcttcaggaggcttccccacccatcgaaatcagggcagcaaggggctccccttgtcttcttccctctttgcatacatccagccctgggctgattaggactctaagccctgtaggccctgacactaaaataatcaggtcctcccaccactgccccgccctgcctcaccccaccaagggctacacaggcatttcaaaggagaaacagtaaaataagtttaaggaagtctgccaaatttggatttttcccatgttgactactttagtgacttttctgaaataaaatgtgctttcaaaacacaatttttgatgcctctactttgctagtgctttaagcatctcttgagtgtgcctgtgaggtatttcagcattggagttggaaccagacaggaaaaggaaagaaaccgatctgtatcgggcacctgctgcatgccaaggactgtgcaaggtgttgacaaaataacaacagtaacaaacataacatttaaatcgtccttgtgacatttatatagcaatctgtgccaagtaccactctaagcgctttcggtacattaagctaatttaatcctcacaacaaccctatgtggtaggtagtgtgattattcccatgtaacagatgaaatctcacactatgagagacaggcactgatccccctattttatagatgaggaaactgaggcttgggaagaagtgacttgcccaagtgccccgatgcctggtggaagaacagtgttcacaccagctttggccacttccaaagcccttgatgttgacactccaaatgcaggcctcactcatttcctagaagcgccttatgatttgatatgtcctcagggtgcattataagaggagggaggaaaacctgggactacaatgagcattgaatcttgtcctgatcttctcagggaccctctgtcattcccgattgcctattgcatctgttctcacctggtactaccattccctcctccctggtttttcccttgctaagtgaccactctatacgttggtccatatcatgtagcctctgctggaggcaagtctggttcccatctgccttcccctgaagaagaagctgctggaaaattagagttatgttggacacagtctttgtccccaaggaacttctctctggtcataatcattatattaacagcaaacctatagcatgctatgtgctagacactttagcaacttggttttatgtaagccttacagtatccccaggaagtgagcactattactagaccctttccagatgaggacactgaagactagagggcataagcaaatgtccaatgtctcacttctcataagtggaaaagccaggattcgaacccagatggtttgcctccagtgcctgcatgctgaatcactggactaggctggacctgagcatttagaggacattatagattatgtaacactgtggggattcagaggatggagaaagcacctctatctgaggggcaggggctggagaattagagaagatggccgaaagaggcggcattagagctcaacaaaagagctaggggttggcccaggcaagaatgtaggttagtgaagttctaggcagaaggaacaggataagcaaagtcacagaggcaggcaacaagaaggggaaagaaatgaaaactgacagtgatgttttgtatgcttgtgacttggaggatgttaacagaaagaggatgccatcagaagtgggaggcaaggagcagagtcaggctgtccatgttcaggagaatgggacaaggtcctaggaggtagtagacagcaaggatgaggaaagcaccaagcaagtagggatcgagactgtgccctctcagcaccacccttgtccccctaagtgtctccccgtgatcactgcagcttacatttgattcctccttctcctctcccagggaacttactatttgtccccatgatttagcctttgattaccttgaactgttctatcatcattccctgtaaacacgcttgactctccagcaagagtgacctttcctcagagacctggacctttctttcttcccttctcagcatcttcgagcatcccaggacagtactgggcaaaagactggtacttggtgacttgaactgatatttcacagagatgcacaaagacttgggattccttaattagaattcatgcggcagagaaacttgggcatgactttgaggatctcccccacccgccaacagcatattcacaagatacgaacatcaaagattgtggcttggtgtgaaaacatagcacattggaggccattccataacagcttagagctgatgaagagaaaaagatatggtgtgttgggtgaaatagaactgaaggccagtcctagcttaccgtttaggagctgtgtggtttgaagaaattgtttagcccctttctgcatatcagcttcttcatctgttaaacaataacaatcatggtatcaattcattggattgtcatgaggattagtgagataatatgaatgtgtttagtaagctataaggcagtgcatacgtggtggggatcagtattagatgacaataatggtcatagcaataataatgattttgatagtggtggtgatgatgtttgtgatggtggtgtgatggtggtgatggggatggtgttattcgtggtggtaattattatattatggatgtgtgagtctgttttcacactgctgtaaagaactacctgagactgggtaatttatgaagaaaagaggcttaactgactcacagttctacaggctttccaggaggcatggctggggaggcctcaggaaacttacaactgtggcagaaggctaaaggggaagcaggcatattttcacatagtggtaggacagagagagagcaaaggggggtgtgctacatacttttaaacaaccagatttcatgagaactccctcactatcacaagaacagcttgggggaaactgcccccatgatctggtcacctcccaccttgtccctcccccaacattattaactacagttcaacatgggatttgggtgaggacatagaggcaaaccatatcaagggataatattgttgatgatggcagaggtgttggtgacagtaatgacagtaggggcttcatggcaataatgatgatgatgatggaggattacaatattagtggtaatggtgattattatagtataggtgatgttgattataagggtggtggtggtggtgacaatggtgatggtggtagtgatggtgatgatgatgataatagtaatgatggtgatatggtagtatgacagcgatggtggtatggtggtggtggtgatgatagtgacggtggtgatgatggtgatggtgatggtagtagtgatggtggtgattatggaggtggtgatggtgataatggtaatgatggtagtgatggtggtggtggtagtgatgatggtgaagtgatagtgatggtggtggttatggaggtggtgatggtgataatggtaatgatggtagtgatggtggtggtggtagtgatgatggtgaagtgatagtgatggtagtggttatggaggcggtgatggtgataatggtaatgatggtagtgacggtggtggtggtagtgatgatggtgaagtgatagtgatggtggtggttatggaggtggtggtgacgatagtgatggtggtgatgataatagtaatgatggtggtgtggtcataatgatagtgatggtggtggtgtggtggtagtgatagttgtgatgaaaggtggtgatggtggcagtggtgatgatagcagtagggctgatggtggtgacagtggtgattatatagtgatgtaagtagtagtgttgttggaaggatgatagtggtagtggtgtcaacagcactggtgaatttaaggcaatcattccctttgtccaaactatcttctttgactaggctgcacagaaggatttccaacccccagaacttgaattcccccaggtgtatttgtcaaaagtaggaaagaataagacaaatcagcccatgccttcagatttcttctcttattcctggttggtactttcagaatcattttaatgtaagctgctttcttgacatttgcattccagcacgtggcacagtgccatggctggtacatcgtcaagtcttcaataaatatttgtgaaatgaagggatgaacttgcagaaagacacaggctgttctcttggatgaactcatcagagttaaatgtttcatctttgaagataacgcgggggttatcaggcacatcagaatatacctgcattaacactattgccagcatgagcaattcgataacctggcaggttgggaagatttcttggcacctacactgcccctggaagcccccggatgtcagcttggcctggcccttgtacccaccactttgccctcagaggtagggtctgttctactgggattctgtgctaactgatcacagggaacagtggggaaaatggcctctcccaccggctgcttctggagagtccaagcctccctcctcagtgaccttgctgtgcggcaggaatgagaggcacatcctggctctggagatgttcttcttggcagcaagtcctccccaatggcaggagggattacagaagtgatttcaggtgccagtgcctccacagcccacccaccctctgctctaggcaagtcagaggcacctgtagagcctctgttctttgtgtgtggaaaaggaataatctcgcaccagcattataaggttctcatggtttttaggggtgtggcatatagtgagggctccgctaatggcagcagctattaatattggtatcatttattatttccattactagtggagacattgagctgatatatgggtcaataatgatagactagagactttgtgtgtctctttggtggaacatgtgtggcttggattcaccttgaatcccctgattctggcactctggcctgagagtgtcctctgaatgagtcatgtggtgccagcggggttgttgagatagatagatggcctgcaggcatttgggttcaaatgctgttctgctgaataaggaatacgatttggggaccaaacacccttggatttaaatcccagacttgtttttccctggtggtgtggccctagggaagtatttctgctgagccttactgtcttcttgtgtccagtaaggttagtaatattgaccacattggctctttgggaagaggatggaaaataaagtgtaaatggagcgagggagggaatttgtctccgaggcagcacaggacaggaggtaatggaaagaccaaagtggtttttggattagagctgcctgcagcctttatctgtctatggagttgatttattattctcccaaatcttggaacaaagtcaagaaagggaggaaggaagggagagagatgggtaataagagtatggaagaaaatgtaaacatgtagagtgcagacagcggctgcctgcccatagcaagccctccgcagagggagaattaattggctgttgtcatttgtattgttgtgattgttcttattgttgaaagatgtagaagagaaatcaggtagaaagaattcaagcaaagacagggggtgagcgaaagcatgaagaaatgaacagaatctgggctgaatttctttaaggttataaagcactctatgcaatctgaggcaggcagtccccaagcttctagtaccaccctgcgactctacgtgtcaaacaggaggagttccttaaagggtgtttggtgtgtgcatgtgtgtagagggatgaagcatgtatacctctttgtatacatcagacactgtgctgggcactgcccttaaattatctcacttaattgtcacacagtcctatgaagcagatgctgttattgtctcagttttagagacaagaaaactgaagctcagagaaaagaagtgatgaccagcccaaggtcacatagctgctaagtgcagggacagcatcagaacccaggcccgtctgtgcccttaggtctcagagattctacacctactacctagtattagctcaatctgacccttggggaaattaagccccaggaaagctgtttccttcagttgcgcagccaacttgaagcaatggtagactgaatcccagttctgactgccagctccacagtccctccctggggcctcgcacatcattggaactgacaacacaagaatcttccatctccttccttctcttcctccttttcttggctgtcatccaaaactttaggggaatgcattataaaccaacttgagagacagagaaaggctgtaggaagatccaactcaaaaacattttggtgtttgctttacctccgcctgagcgtccctggagataaaccctcctcactctcgcccaccattgctctgctatgtcaatttcagcagccggactctggggctgacatgcattgccccttctcaacccagacaccacttccttcagggaaggctccacataatggtgaagtgcacagactcagaagccgggcagtgctgttcagaacctggttctgcctttctcgggcgtgtggccttggataagtcatctactctctatgagcctcagatccttcgtctgcaaaacagagctaatgcctcccttcttgggttgctgtggggcttaattgagaaggtatatgtgaaatgcctgctccataatagacacccgtttgagaattaacgtttgggttgttacagtgtgagcccatgggtctcaggcaacagacttgataaatacaggttcctctgcaaccacaatcctagtccttagcacaagcatgacactgcctggcatgtgctatccctcccatatccatcagccatggcagacacagatccctcattatgagacttttttattctgagctagaatgtgacctcagaatctttcttaacacaatgcttcaagcagtcactaccagttgaacatagttgacatggaagatagatgaagtttatttgcattctagttctcaccaagtccatgttcactgctccatctgctcagtgcaggctgtctctctgctctgtctcccacctgcttttgtgagtgtatgtttctatgtttgtgtatatgtgtgtttaaactcctcttccagagtgaaagaccatttcagtcttttgtgtgctgatttgtagaaatcattgaactttcagaatcccatttgcaatgtcatgtctgtggctggggatctccaagtaacatcagcttacgtctgggaaggacaaggggaatcaaagttagaagtcaggagagcaaaatccacacacagcatgcaccatcggccacctttaggagtgacacaagagatggtgtttgaatataaatttgaagtctttccaaagatttaacactcctttggctgacaaccataatctcaaggaggtaggcctaggctagagcaattatactttagggtaaccctagctgctataacaaataaaccccaatattgcagtaggctgaaacatagaattgtttttatcattcatataacttcttgatgggccagtagccttcttccatgtagtcactcagggacctagcctccttccatcttgttgctcccccaaccctaaggcatcctctacatctaggtgaaaggggagcagaaaatgtggtctctggcccaggaacaactctagtcttggagaagcacatgatatagtatggagatcacagccaggcctgccaccggcagcaattcagggctgggcaccagatcagctgggtggagtcccagctggccaaggagtctgagcccaggtactatgtggtcatcttgggcatggaacagggcagctcaaggaccagaggtcagctggcagggtccgcaccaagcctatccagggaagccctgccctgatcatggacaaggcctgtgtaatcctgatgtcagctgcttccctcccgaggacagcctgcagcagatggtcagagcctgttgccattaaacatttgagtggttccaccagcatcccgatgagtctgggttcaccaagaaacattattgtaatgtgctccccaggcagctctgcctcagggagagacaatgccaggcatgacaacttcagcattcttgttctgcatggcagttgcatttctcattgtggtttatatgttggtcacatgatctgagctaatgggagtattcgcctgacagatgagtcccttttgctgggtgtgccagcaaaatcaggcttccaagcccccaaggctcactgccagaggctggggaattcgccaaggtaaatgccaccttgtgaggtctttgggacacagccagcagcctccccagggcaccattcctgtctcagcatgaggcttctctggccagcccaatggcatttgggagccacatccacaccccacgggtctgggtctgtttccagctgcactgggacattctggcagattctccctgatctctgtaaggaagagtacagcaggaaggagaggaagcagaaaaaaattccaatgcttagagttttccctctaaagaggacctcctgagccacttctgaacaggacttggaacaaaggaatcttggcgctttgatgatcgtgtctgcagcagttgttgaaatgagtctgacactcgccagtgccttagtaggaattataattacatcaggagaccccaggcaaccaagtaaactgattagctactgctccgagttgatagatttttttctctctaggtcataaatagggctgtgggagatggtggaagcatgctggtgggaacaggtcgagatgggctgtacattcaggaagcccaaccaagtggtgtgggcagctccccctgccccaccctgccaccggaagagacagtctgacaggtgcccaaggtagagttcagttccctcggccagggactgcactcctgatcttgcgtgctgcagagagctgtcctcagagcaggctgagggtggctgaactgctaggcgatgctctgggaagccctccgccaggaaagccgatgctttctgccaggcataattattgcatggataattacacgattcagagcctgctggagaatcctgggctggtgccagagtagaaaggcagggttccggaactgcagccagtggctgattctcagagtcgactttgaaagaagagggtaatcattcctcctcctaagactcctacctggctgggccaggacatggcaaacgtaaagctaagggaggcggggagttgatgagttctctcctccacccactcccttacaggagggggtccccagagttctgacctaatccctcttctttactccctgcacgtgtcacctccctgggacaatccacccctgcccattagcacatatatgcggatgacaccaagtgtctttccagccaggcatctgcaaatgcatgctgggcatctccctcacgtgtctcctccagcccattgcactccagcctgagccattctcctcctaccccagtctgcctctcagtccatattctcttcccagccagacatacctaacctcccagacctccactaggaacccaggagtcctaacctgctagtcctttcccactccctgtgcaccatccgaagccaggtcatgtcagttctacagcagatgtgtcttggctcctgcctgttctcccagcaccaccccccagtcctccggcacagcccaggtctgggctccatggtctgccctggctttcttgtggtggcctcctccctggcctccccaccctcatcccctggggaccagcctcccactgcctccagatccaatgtcttccagtaaatctgtctacacattcccaaggttggagtccttccatggtttccttcactctcagcaccaacttggccccttctgactgtcctgaagacccttcccaagctgccaacgctccagcactgcatcccctgccctgcttgtgacacccaaccctatcagatgccacatgcacttctcccagttgtccaatgtggctttgccaagcctgagcatacatgtgtggaagggaggaatgcaagggtgaatgttctggactctggagctacactgtgtgggtttcaatcttagctctgtcacttgctagctgtgtgacccaggacaagtcacttggcccctctgttattctttcttcccatctataatgtagaaataatagtaataacagaacccatccatggggttgttgggaggattcaatgacatattcatgtaaaagactcagagcatgaccagtgcacagtggccatcttatcaagtgcctgctgcctgtcccaagatggaaacacaaaatgtgaaatccaagtgtgggtggtggaggggtggtatggggcggggcgggaattcagtttaaactagttcatgccttcattttacagagggagaaacaggtcctgagagaggagggaccttacccatggccaccccaggacccagcccagtgttcttggttctgaggcccggctgccctggcatggagcagacagctccctctgggtggtcaagttccctgagttctttgagggctgactagtggtgagagggattcctccccaccaaacccctgactctgagaagtgggttggagcaggagaagaaaagtgtgcaactcagctcagctttccagggtaaaccgatgagaggacatttgacggtggcagcgttaggaggggacttctgcacaaggccggggaaactttgcctaagatttaggccctgggctcagcctgatgcaccccatttactgggtgcctgctctgagaccaggatacgtggaaagaacccacgcctgggagccagctgtcctgggctttggaaatagctgtgtccgtaggtgagaccttgtctctgcaggcctctagcagaggggctaagagcatgcgctctgcaggctgcctgggtcctcacccctactcccgcacttagtagcccttggtgacttaaccttcctgagcctcagttttctcttctgtaaatggaagatcataatgatacctgccccatagagttgtgtggataagcgatagaatctgcattaaagcatttaggtagtgcctgagatttagcaaaggctcaatcaacatttaaaaatggcaagaaccaagcactatcatgcaggtagggcacccatctttgtgcataatccctttgccttccctccctagaatgcagaggaaggaagacctctgtgagaaccctacatacatctttgccaattggcagtttttcctctagttaatttgggagcctgtgacctttaccgccgtgtgattctctgactcagactgcagtgttgcagtgccagccaaacatggtgacaagccccttcccaggcaactgaggacaggcaggagtgttctggaatcttctcctggagtgggagtaagggtgggcagagccatgtgatgctgcactgtccacctggttgaaggaagtaattccagactctgtctctgacatctctattagccaagggtgagggtgttagttcgggtcatgttagctgcgcctcccaccctgcatcctgggcccagaaaccacacccctgtgcagggcttctgtgtcagagtcaccagggaaatgggctgctgaggatgccagcaccaaccaggctgctgtcctggggcgacatgtctgccatcttacaacctcccttccaatattcaccatgtgccagctccagctcagtcactgagcctcacatcgctggaccccactgtgtgctcagggtcatcaggcactttcgcctgtggctgggattgagacctggctcctccaccttgcacttgtgtgacctggccatgctcatgtcaccctcctgggcaccccaataccctcatttgtaaagttcaacctacatgctgtgactgtgaagtgagaaagcagtcagcagtgcttagaacagtgcctggctcctactacacactcaataatgccagctatgttgtcaatatcaactctacgcagtagcccatttctgtagatgaagaaagggaggctacaggaagggaaggcatgtgcctggggtggattcgaactcaggcctgtcgggttccagtctgggcttttctgctctttccaggccatattggaactgccattagagggactcattcattcccatacatgtcaaatatgcactgcacccagattacatccatctttaattgaagacctatccttctgggctttggagatttgctggacttggggagtcaccaatacaactcaggtagtgacatctgggaggagaagactgaggtgtcatcagctgcttcttatccccctgcctttgctcagcctgtccccactgatgggacacctttgcccaacctctcacccataccttttatctgattagctttttttttttttttttttttgagacagaatcgcgctctgttgcccaggctggaatgcagtggcgcgatctcagctcagggcaacctccacctaccaggttccagtgattctcctgcctcagcctcccaagtagctgggattacaggtgcctgccaccacacccggctaatttttgtatttttagtagacatgggctttcaccatgttggccaggctggtcttgaattcctgacctcaggtgatctgcccacttctgcctcccaaagttctgggattacaggtgtgagccaccgcacccggcctgattagttgcttcttcctgtcctttgggacctggtacaggcatcaccttctctgggatgcttcccttgtccctccctcatcacaaggctggcttgggtgacctttctccatgctccaaaactcccttgctcctaagcagccccagcatggagctccaagccatgaagctctaatatcagagtccaagccttatagagcttccagggtctgacacatggcagaagttaaattaaactatgtatttgtttatttgctaacattctgccttattacaaaagagacttgagtcaactaagcaaataaatgtttgcagagctgaattaaactgagacagggtactggcccagtagaaaagtagaaaatacctgggcttgggcatcaggaagacctgggtgagaattctccagacctgtgccttctatggaacattaaaaaggtcactttccctctcaaagcctcagttagctcttcagggcctgcgaacggcaatctattgtgaggacctggtgtgtgagccaagtgcacccatcagccactcacagctgcagcagaaccaggcagttgagtttgacattggccttttaagctagtcacgaataatcagaagacccatggcaggctgtcactagtgattttgcttaggtacaaacttgaatggtgctccttggagttctgatgtgggagagtcactgagctggacgttagcacacacagttacacgctcacaggctcaccccagcatgcatgtctcaaaacaatatattttcctctatttgtccttgggttttcagttacagcaaaagtattttcaaaacaaaacaaaatgcatcatgatacaatctcatatcaagtaacattcatttggggggacgcacttaaattaatagtttcataagcggttgttgtcctgcatttacagacacacgacaattctgaaggggtcatgttatttttcgattatcctttactgcattttatgtgggacatggcatgctgcagtggtgtttgtgagctggaggatttgggagagccttaggaaccctcccaggagcctcaaggattgactgcagtaggagctcaaatgagttttgcctggggcctgccctggaggagacctgcctctcagcagccaatcccacccaggctgctctggaactggaggctctggctcactgggccctgctccccacccacttccctctcgcctctcccattcccttccccagtctgcagcccctttgttcaaggagggagctgcaagcgggtggtctctgggcagctggataactacttctaaagcctcttagaccctggtaatcttcctcctaacaccatcgggtgactgcaaagcactgcaggccagacttcagttctgctgtgtaatttgcaagctgggtgaccttccttatctatagaatgggctctcctgcatggctggcatgaggaataaacaaaatggttgtgtccagtgcctggggcatagcacagctcaaaaaacttagttcatcctcctgagggatcaagaagatacttggaaacaaatgtccaagggcgtaatcttgaaggggcttgtgccaggcatatatggagagaagggttttgtgggatgtcagacttaatagtgccctttactccccacccccgtctctctgttcatagacaggaaatctgtggcctattctgggacctcaaagtgccacagggttaaagataccaagtcagaaatctaaggttctaaatggactttagaccatttttcatttgggaaggaagaattctttaaggggttgtgctggcgctgtctctgtatgcatgtgcagaatgtgcttccagatggggtaatggtctgagtttgaggacagaagtccactccactgcattcaactgttcaatagtcctgggcagtgttattgcatgggagaccatacctaaccccaaagattgccccatagtctctttgtcagataaagcataagtgagcatcccatctttgttagtcagaaccttttcagtttcaaacaacagaaaaccaactcttcctgtttaaaggaagaaaaggggggtttattggttcatgtaataaaatggccagggtaagattaacttcaggcagagctgaatacaggtgctcaaagaaaatgtcgacaagaacctgttgatttctctgtctcagctctgctctcttctgtcttggcttcattctcaggaaatgctctaaccttggggttccaagagtagtcaccagcagccccatatttacagcccaccagctcagcaacctctgtgggaaagagcttctcaatagttccaggaaaagtcccagggctggctcccattggcctagatagggttctgtgttatgctgtgaggtgctggttctggggacggaggagtgttctgccttaacaaccgaatggactgtatttgtggggaggtgtgggaaaccaaggagctcttaccaggagaatggatgttgggccagcagaaacaaaatatgttactgccttcttcaagtacacaggtttctgtaaagcctaacatcacactgaggcaccacttgccccaaactccagcctgaaggattatgaggagttcgagcttgcctttgcagggcgcctgcttcctgttaggactgtgctcattgtacatggaccttcttctgaacctctgagattggttctgttatctttattcccattttacagatagccaaccacaaacttactgggtggagtaacagtgttgcccagagttagagcttataaatggcagagttggagtttggacctatattaaacagtctaacttcacagggcagactcttagccatcaagcaatatggtcttccccgagaatgtctccccacttcacccttccaggcctttcttcttgttggactctagactttaaatgcccttctttttacttcctgctcacttattaaactcttccttgaatgctcctcctcctgatagttttccccaggattaaatctgagcaagacccttttctacaagaccaaggtcaccatgccactgctgactacagctggtgtatttgtttgtcctaacccttggagggcagagactaaatttattgtttaccactctggcacctagtacactgcctggcacagagtaggtgctcatggctcataacatgtttattgattgtttagatggcaacacagataaaatcaaaacatggaaggttgctgagactcaaagacaggattattattgttggtaatgatctgatagctaatgagtattatattaataatagtcaacatgtcaggtactataatagaggctttgcgtaactgctccttttagtcctcccagtaatactatgatgctgatattactcttcccattttgtagataaagaaactgggagtcaaggaggtgaaatggctttcccaaagtcttgcatataatgtatccggactgcaaggatggggccctctggccccctcaacaccctatctgcctctcatacccagggacctgcccacaaggtcagccccttggcaatcttgccaaccttggggctcaaaattcagtttatggcttcccaagatctactggatgctttttctaagtttggagaattcatgacattatgaatcctttttccccaaggtgggtattcaaactcagagttccagccacgcttgcatccagggctcagatagcagagggacctgcctgaggcttgatttagaagggtccacctgaggatgtggatgaagcgtgaattcatttctggcaggggtggcagcagaggcagacagctctgtggaggcagaggtggggaaattctggtgtctccttcctagtgtggaccatcgcgcctgtgttgagcagtggagatagtggggtctttcctgcagaggcctccatggtagggctcaaacattgttctagctggggtggcctccaagcctaataccttgaccctcttcgagattctctgcactgccaaatatcttctaataaattccttctctgcataaaccaactagaatagattctgtagtttacaaccaagaatcctgactgaaaccccctgaagcttgtgggtttaggtatgaccatgtgggaaggcagcatgagctctggactataaagagaatcagttgaggatgtggcagcaaacaggtatactaggggatcaacgaggggaattattatgatgatgggcctttggaaacctctgccttctacagcagtactttgaaactcttgtgcacacagatcacctaaggatgttgttagcatgcaaattctgattcaggagtttggggctgggacctgggatcctgcatttccaatacccttctccacttaagttttgctgatgctggtagtctgaggaccaccaatgaggtggtgaggttccagggacgcttaagcctccagcaaaacatcacacaagacagaagtgcctacttcaattgcatgagataatgagaccaaatcatccccgggcaagcccaccactaacaattattcccatcattggtaacatcctaagtcctaaggtacctggagcttcaaatctcataattagcactcttgttatgccaagcctgctcctaatgaggacactttgataattcgctttgttgaagaaacaggatctgttcctttcccctacagtacagcatgataggagtgtggtttgctatttgtacctgtaactcagcccagggagtgctgacaatgggggagccactgcaggagtcccagcctccccacctcatgccccaccccctgtcctaagccccacccttcccagcaaaggaaagtaggcccctgaagcagttgtcctgtcctctagaatcctctagaatccagctacaaacatccaagtcctgcccccatcttcccgatctaactcacaccatttgtcatagtgacctggcctcagcctctttcaacttcttctctcactgccacacctttgcgtaggcagctctccagcctggaataccctcttatccatccggccaactcctccatgacctctgagatccatgtggaaggctctagaaagccttcctcaaatttcctttgttccaggatttaagctgacctaaatcctagagattagtacttcattttcaaacttttcatttgctcaaagcctacagcaaactcagtccacacacttggctatacaagaaaggttgctttctttgttgttctataactgactttaatttcaacttcaagtccccattcttgccaaggggtagaaatggaatcttggtcaacttaggttcccctccctactctctggggttgcatttccaggccaggcagtttctgctggtgcttttgttccttggtcctcagtcttctttctgtgttgacatccattgacatgtcctcgactcccctcatctcagatcacaggcccatgctgactccaggagtattcttgtattctcttcatctgaacctcaacactttttgagaccacgcatgcatgtgctctctctttctctctctctctaacacttctggaacactcttggacatgaggagatattggtctttctaggatggggtcaactggccctgcctcagatccattggcctgtacatatcttgtagccattgtggtgccatggatcacaggtcacgatgctgtgtggctgcctctgctcttagacctgccccccatgccaccagagggagtgtctgcctccccctgccctggacactcagctggaggggagggtcacagtccctcacagtcccttctccagtgacaagcaacaaactcccagtcttcctttctttctgatcctctcctcctcttcctccttctcctcttcctcctctcccagtccaaggaagttttatgcaaaggccagaggagggaataatgaggtggaggtctctctgaccaagcatgtagccttccggatctgttgtgctttccaggagtccttcaaagctctaagcttttggaattctgcaagctcaggaaattgaaaaccttttctctcacaactgcaggtctttgtctgcagttgtaaaagtctgtttagaaactcaggagacaagcagcatcttctttgttccctgctttctggaggcagtcagcgtggaacaccctgcctgcagtctgactcagggaaagggtcactgagtgtgtgtgtgtgtgttgaggggtggataataagcaaggagaacactcagacagagagctcacagaggggcaccccagcacctccctcacctctatattccccgcctgggcatagtggagggagggttaatgccagccaagtttaacaggcatttctgattcgcggcattgttgttgcgctatcctgcaatcctacgctgcgggtactgtttttatcctgatccttcagctctggaaactaatatagagagctgagtaacttgcttgaggccatgatgccaggatccacggtgcccccaggctgaagagccttaaccactgggctgtaccacctcacaggagggcaggtggcacagtgcctggaacttgggagggtccagcacgtggaactatgctctgtcatttacttactgtgtgtcactggatcagtcactcaacaccgctaagcctcattttccacctcttcaaaagggatctaataaacctgttagcagaaggctgctgtgaacactaaatgaggtggcttaggtgagagctctggtctgaagatgctcacactttgaatctcaagacttgtgtgaaccaatatcagatttctcctattagattgcaattctcagggagtcacattccgtctccaaatgcccatctcctgatccacaaaatgagcacaacatctctgataaacggtaactagatggttccagtgggcagcgggagtgggagggcggttgactgggccagaacctcaaatgtattcctgtgtagtttctcatgcattcattcagtttggcaccagaaggtgcccagactcactttgcagccagtctgtccccatagaggtgataaaggaaaaacatatgcacatttaaacttttaaaagtttatttgaacattcagcgattcacaaacggtatagcacagacagcaagcaactagcactcctctaggaggggccaaacaggatacttttataaagaggttgcagaagcaagacaaagaaaaccattttaatgggttggaatggaaagttcctaattagaggttcattggtggctcctgattggtgcagcttctagtttcaacttactgtttacattggtctgtggtttgtccccataggaacgtaaggtgtcagagccagctactcaggagaatgaggtgaaaggatcacctgagcagggtaggtggaggctgtggtaagcagtgattgcaccactgtactccaacgtgggcaacagagtgagacccttaaaaaaagaaggaagagagggagagggagaaggaggaggaggaggaggaggaggaggagaaggaggagaaggagaagaaggagaaggaggtggcagagctacagaagcacctgttgcccaggatggagtgcagtgatgtgaccacagctcactgcaaccttgatttcctgggctcaagtgattccccccacctcaacctcccaagtagctgggaccacaggcaggcaccaccatgcccagctaatttttttttattttttgtagaaatgggggtctcattatgttccccaggctggtcttgaactcctgggctcaagtgatcctcccaccagagcctctcaaagtgctgggattaccagcatgagctaccataccatgcccggcatagatttttttttttttttaacagaggctacagacaagactgactgcctggcctagagttgaggcccgggagacttgcctcctgtgtgcagcgggctgtgctggttgcctcggtttcccagagtctgatgaacatgtttcctccacaggcagtagctgcttcatttgtttttctcccagttttcatttctcattagctgctaaatcctccccatggctgcagaccctattgtagctgactcagccagtgggcacagcaggggctgggtcccagcgccgtctccgcaacctaggagaggtcaggggcagcagtgcctgcctggctctatctccaagtgtgcctcacccccactgacaggtcagattatccactgtccccagagacgttaggagggaggccgtgtcctccactcccctagctgacacactggaaggacgttctccttgacatctgacttaatgacagtggaaccaagcggggtgcccttgggtgaaggaaaaaggagggaagacttgagccttctttaatgtcaataccctgagcctgaggccacaagcaaaggccagcagcttctgcaggatagcagaagccaggagacagggaactggggagtgtacatttatttgcttctccaacaacaacaacaatatctaggtgtgcagtgagctcccacttctgctgatgtgggactagacaaaagatgagaggggaccaccctcagaggctccctcctgcttggccccaaactctttgtaaatccagcaccccacccccagttgttccccttcaggaatcatcaccctctgaaaacctgcagaaattctcaaatcccagccccctttgcttctcacacttgtagaggtctttccctaagcaaacacctgctttgattattcagggagtgagaattaatatcattgtaaatctaactcaaacataattaagaagttaaatctacttttgagggaaaaagttctgattgctcatctccagaccagataaataagatttcaaatctccaagatctgcagctcggtgtgaactgccctccgcctgtctcagccagaacatcaagtggaaaggggcctgaggaactgcctcctccagccccaccagtgtggagatgcagctcagtcttgccatctgtgaaatgggattgataatacctacatggttgtcttgagtttagctcataaccctttctccgccagaatatcaactccgtaaaggcaggattttgtttgttccccatagtatccccagtgcctcacacatggtaagcatttaataaaaacaaagccatcaatggagatgacgaaacccagagagcagcagtgccttgaccggggtcacacagcaagttagagcagagccctgattgaaaccaagggctcctgggccttaaactaggcgctccttgcattagcctgtggcaggagatgtaggtttgctgtcaatccttccaccagttactactgcctgtgcagccttgtgcatgaccttgctttccctgggcctcagttttcccagcagtagaatgggcttattattagaggagaagaccacatccactttggaaaacgggcagaaccttgtcccaccttcccccaacagctgaccattttctgcccaggctgtggccagaacctgttctctcccatcattaaaatccctctctccttctccaactctttctttctagctccaccctccccaaagaggaaacaaaggaaggcaaacatattcctgttaccagcccaggtctcagtgggccaaggtggagtgaggggagggaagaggctacagtcctcccactctgcccccacacacctgcagagacattaaggaaagcggagctaccctgggctgcctctctgtgatttaacgctctctcactcccacacctgcagtgcaccggagttaaaaatgaccttggcaaacagccttatgtattctctgtctagagcagaggacagagtcaaagaaaacccactcagaagcctggagagcggctgaaagtgggggagggcaggaaaggagggaggcaggatggaagcatgcatctcctgggcattagacttgctggattaaggagtggagagtcaaacatgggtagctctgctcagaaaaattattactgaaggagagattatgctccacaatctcaccagaatgtggctttgcaaagtgaaacgagggttcgttcctctgccagcacgaccaactctcccgggacaccccctcaggtccgtccttgtgccacaggccacctcacttcaggttggtggctcagagaggtagcagctcccatctaaatgtggcttctagaaccttctcttctcctgctgagaaaggattgtgctgagtagtagaagcagctggcagtggagtcccctggcctggttcctacaatcccaactttgacaattgtgtgacctcggacaagtcaccttacccatctaagcacatgttgttttaactgtaaaatgaggaaaatagcattcaactcagggtatgaatgagtggagccatgtggagcaacagttaagggcatggacttgggagtcaggcagccaaggtctgtgattctaggcaagtgatgtcaccactgagcctcagtttctccacctgtcatacaggcaggagtaaatgcctcctcaccccctttgttccttgtacaaacccttgccctggatgttctgtttgtcctcaggaccccctctccactgttggctggggaggctgacctgggaggactctgtgaatgaggcccctgccttccgacttcagctgttcatgacacaggcggagactgcgggcaggaggagagtgacacgaggtgtcaactcccaggctccctccctgagggttatagggcatggctctcttccatagctttctttgctcggccttttgttgatggttttcctcattcatcaaattggggtgctgagggcacccactgcttctgtcccagggcactgccctcttcgtgtgctttcccactctctccctacaccactgtacacagtccttttgttacacggccttccaattccccaatctgagggtgccattgtgtccagctgagaccctgaatgaagcaactgtcccgtctggccacagacctggcacaatttcccttcaggcacttaaagcaggagtaatgaacactgatgagttcagctcagtgctaatccctctacatgtgaaatctcagttcttcagagagccctgggaggaagctactacagcctttcccattttaaagatgagaaaactgaggctctgagaaggtttcacagccagagctaagcctagagcccttaatgactatcctcatgccctctccagtataggcaggaggctactgagtacacgtgcttgaacttccaaggcatgttctcaagtagaagtgtcctcctcacaactgctctgaggcacatgccatcggaaagctgggctaataattaaacaggggtgattttgtcagccccacatggcctgacaaagcagaaacacaatggatggtaaatattctattacgactgttattcccaaccccctttccaatggggtggtgagtaggaagcctccctatgaccagtttcttccccacagtcttgccagctcctgttcttctcatcacaccaggcttgtggccttgattttggaccctgttggaatgagggtcacaagagggtctgtctgtccacacacacagttgttcctcctccttcttccccacctccattcttacccattctcagtccttattccagactcctcccttgcaccagctgtgtccttggcctggggatgcataatgagacccagatgctgcccccaaaactctcagtttatggactgtccatcttgaagagatgaccacaggatgctcaatgctccagcaaagaggaatcctgtggttcaccaaaggcacacaggtctttggcacttagagaaatcatttgtcatatgttcctctaagtgccaaaggcctgtgtgcctgcagtcattcattaattgaaccaatattattcaatgagtccatttctggccactccttctcagctagccttctttatgagattttcctccactgacactccctgaactgctgctagccccagggctctgggctggctttctattcctccttctgggggtgtcattcattctcttggctttaaagaccatccatatgcaatctgcaggtcctatgatcatggcctccagaatctgtctcatttcgtccacatctcatcacctcctgttttctcactagcccaagccaaactcatctctagtctacactattgcagacatttcaggattgcctcattgccagcaaatttgcctcctacaagtcactattaattcatatgtcgggttgtcacttcctggttttacttcaggttttaataagcctgaagggaaacacttgttttcattccccagcatgaaactgggacatttcctctggtccttggagtgaaatccacactcccaaccacagacttcaaggccgcacctgctctgaccctgctgacctcccatctttcaccactggctgtggcttccttgcacttttgcaacaccaagctttttcctgctttcaacccccagacctgcccgtgggttgcaatttttgggcatccggatctcagcaaatgtgcctgctcctcagaaaggccttcctggccgttctgcctgaagaagcccctgtccacatcaagggtcttgcatctcatcaccctgttttattttccccatagcgctcatcccaacctaaagtatcttgtgaacgtgctgctggtctgttatccattgtcctcgctagacttcaagcccccgaagagcagggacctggcctgcctgttcaccattgtctctagcacctagaactcaggcctggtacaggataggtgctcaacaagttgttaaggacaaatgtcaagaagtacctgggggaagtgaggggctgaattggggggaataggttctttggttatggcccaaaaattgctagaagtttaaatgtgtcttctaagcccagctctctgtgttctcaaggtcgcaaatattaagaactcagggtaaataaaaatgtatcctttccagtgcctgcatgcccacactgaaatgagaaaagattttttaaataataataataaaggaacgatctttcaacctgcgtgcgggtctcagcggctccacttgcctgctgtgtggatctgaccagtgcactttcactgcctgggtctgggttcttctgatgtaaagtaaggctcccagtataagctgctttccttctagattccagggaaatcatctcacaaaactcaaatgtgagacaaacaagatttcagggcaaggaaacagactcaggagctttcctgggggcatggctccctcaaagcctacgtcctgtagagacagcagctgctaggcttcttggatagagtgcctgcccccagtgccactcctcactccaccctgcaaaagtctcaaaaggtatgttgaggcacagtaagcaggctgctagagcccagcatacttacagccctgaggttgtcagacaatgagcctcgtgatgagttattgcaccaacagctgttgcccagccctgctatgtggatcttggggacaataatttatccacaattacactggagagcatggtgcttctcaggtaacaggtggaaattcacaagcccaccatgtgatgaagacctgcccttccctgaccacaatgctatgagtaatgactgagaagattgggcagcccatcctcagtaatgcaggatgcactgtggcccatgtctgaggcatctgaaatatcagaaactccagtgggcttaccatggtcccactcctgccataatggttgccttacagtggctttttcttccaaaccaacttgccttcaactgcagaaggtgaggtccccaaaacaccagtaggccataggatagtgtgcggccggtagaataagaacctcagacacttcccacttcccctggtagagaaggtcttagtggccacaccgaaaggtaggtggaggctaacagatctaaggctgcccagtgtgccatttctgcactggatatgaaatgtgccctctctgagccctctctctgcctcagcgatctcatctatagaatgggggtatagagatagacaatctcatatgtgatcttaggcaagttcagatctcacagtttccaaacttcagtttctccagctatgaagtatgagcttgataatcttggctgtgtgactttggacaaggcccttccactctctgagccttggtttcccatctataaaatgggccaatggtaggggtgggaaaaggatgacctctgaggtcccttccatacagctgcctctgattcttcattgcaagtgacccagtgttccatatgacccatagccatctgtctgtcctttgtgccaggcctgaagcattccttttggactggtcatttctcaccgtcaccccctggagtctgccccaatcatttctcagtccttctgactgtgaagtgtctgtctgaactcataatcagcttttagctggtcccaaacagtgagtgctaccagctccattaatcccactgacagggatttatctttctcagctgaatgaatgatgctcccagccttgccccagaaatgtgggctgggctattcaacacttgtcaccagcaagctcttttcctgaggctgcatactccagccacccaggtgactgagtactttgtcatcttcttctcagagcagtggcagaaccacaaagcaaactcccacccatgacccacccacccaccttctgacctagtttggatgctccaagccataatgataaagtaatgttgtgaagagggaaagaggtttgcagtcagacagcctgaacccaggttctgccatgtacaggctgaagcttggcaagcctctgcacctctctgaggtccatttgcacctctctgaggtccatttgcacatctacaaaaatgcgataacacctacctagcagagttcttaggagatccagataacaaattgaaaacatgccagataatgcctggcacattttagaagcttgagatctactactggttctcttccagttctcccatcgtagtaatatcatctacagagcaagatggggaaaatgctcactgccagatcccattctaaagaggtatctccatctacagatttattgcacccgggctcctagccatacgcccaaaagtcaaactgaacaacagtaataatatttattcagccatgtcacactgaactgaggacctgacttaagcaacaattcagatctgccaacatttactaagcacctactatgtggcaggccgcgtcgtgaccccctggagagagaaagatggattggaaagtgtagcatcaaaattaacagcttggtttggaagtcagacacacctcaggtgaagatatggattgagtcataaactccccatgtggcactgggcaggttcatcacttgaactctctagacctcagcttttaaatctaaaatgtcccatagagttgctacaaagattacatgagatatacacttagcaaagtgcctggctcacagtaattgtcagaaacagaaagtgtcgagactcaaccctgcatggaaaagaaaataggacacacatactatcttagtccattcaggttgctataatagaataccttagattgggtaaagtagtctccccttatccacaggggatatattccaagaccccccgttggcacctgaaatcacagatagtgccaaaccctatatgtactatgtttttcctatacttatatacctatgataaaggctaatttataaattaggcatggtaggagattaacaacaataactaataataaaatagaacaattaccacaatatagtataataaaagttatgtgaatgtggcatctctctcgttcactcgctcaaaatatcttactgtattgtacttacttattttcaaactgcaagtggccatgggtaactgaaactacgggaagtgaaactgctgattggggggactactgtaatttactataatttataaataacagaaatgtattgcaaagtccaaggtcagtgcacaagcaaattcaatgtctggtgagggccagttcttcatagatggtgccttctagctatgtcctcacatagaagaagggacaaagaagctctgttaggcctcttttgtaagggtactgatcccattcatgagggccctgccttcgtgacctaatcaccccgcagatgctccacctctcaacaccactgcaatgagtattaagtttcaacatatgaatactgggggacatgagcgttcacgcctatgtaaatactacacagaaagatgtttatcaggtaaaagaaagtagacacggacagtcctcatttttctaagaataattggtaccagtacaaataccacttaaagagaaacttcttaaaacaaatgttgactatttactgtgatagtgaaggaaaaaggttggagtagggccaaatcttgaaaaaataaaattgaaagcacaaaaataagtcttttttattgtctagtaacaaaatgtaggttttagtgtcaaatgagttaattttttccattaaaaataggaattaccaagtgttgactttgggggaggcatggcacattttttagacaaaatcctatcttagcacagtctaacagttttgattttgtttgactttcacagcacaataaataaagagggtcatttggggcaaatatttccaagctttatccattttcccataggcctcttccaatcgttagaagataacatttttctcctttgaagcacctgacaactttgtcacttttctcttcttcggttgctaactagtttaactctgccagtttctcatttgcctgtagttaaatgtgaatggaaaagttatccaacaatacttttgctatttttatgaaatcctgaatctgtttaaagatttgcacttttcctcttcatcaatttcctttgaatttccattacatcatcagacatttacaacaaccaacaagccgaaggaaaccaatagatctaggttaaatgagtaaggctagaaaccagcgttaatgggaggtaaaacttaagcgtgcataaaacgtttaagtgaccggctcattcgtaagtatttttgtgttatgaagatttttacttctctatcaaaccttgtaacctcagagaattgaataatgacacttagttgtcaaattcaagataaccgacaagagaccgggcgtggtggctcacacctgtaataccagcactttgggaggccgaggccagcgaatcacctgaggtcaggagttctagaccagcctaaccatcatggcggaaacccaatttctactaaaaataataataataataataaaataactgacaagaatttctaaagtagttcagaatagaaagcttactaagttgattcatttaatggttacccttgatattttaacatgtactattacatgttaacatgtacccactaaatgtctagatctcattgatacttcatttaactcctgaacaataatagcttttcagtgtttggactctggttacctccttcctgatgcataggctactgttcatcattttagttctatcttgttacttttagtcatttatatttactatacttacagacactgttgggtttatttttagcaccttcctatttgtttttctatttgtactatctcttctttcttcctttatttcttcattcctgtcttttcaaaaattaagtaaatagttttattattgtatttttttccttatattggcttcttgtttcacattcctgaattttgtgcagtggttaccctagaagttttaatatatatatttagtttattatagtgtatttttaagttaagacttttacttcttcctgaacaatgcaagaactttacaacagttaaactcctgtacccacttctttctttttgtgctgttgttaaacattttacttctgcatagttataaatctgataagacattattgtcattttaaacagccaatattcttttatactaacccaaatatctctcctttgtagtgtttttcattccttcttgcaattttgtgtttctggattgaataattttccttcagcctgaagattcttatttggtatgtcctttagtgtcagtgtgatggcactaaatttttgctgattttcagcatttgtgtgtctgaaaatgtctttattttgtttcatttttgcaggattttttgctgtgtatataacacaagagtggcagtgttcttttcctcttactttagcattttaaagatttttctagagtccatcagtgtttgttgaaaaatccaccttattggtgcttccttgaaggtaatgtcttttttctttgttactgcttttgagaacttctctttacctttgttttcggcattttgactatgatatgtgtagttatgattttctttgtgtttaactttttggagggcttggtgggcttcttgaatcaatgagttggtttctctcatcaattttcggaaactcttgatcattgtctttccaaattttgcttctgcccagtttctcttcttgccttctgggactccaattatgtgtatgttagacctttgataatgccccatgtgttactcatactgttgtcttttaatgttcctttctcttttctctctggttttaattggaattttacctattgttctgtctttaagtcactgaccctatagtctgctatgtccagtctgctgtaaacccatatagtaagtttgtactattttattgattccaagtaactattaacagatactagatttgagaaggctatatgtttttgttcattttgcccatctttttctctattctctttaacagaataaccatagtcaaagtcctgtctgatgaatacaatagctgggtcatctatggatctgtttttattgttagctttctttttctctttgctttgcttcttttcttttctcttcttgctttttcacatgcctcataattttgaccataagctggacattgtatgtaaaagaactgtggaggtttcagctgatacattccaccagagcagcttccccctttcctctgttggagagtcagggtgaaggctgatgacctcagtctagtcagaaatttaagaggattgcagtttgagaaagactgaatcgaccacctctggcttttcccatttccttgtgtggtcttcatggctttggctgggagcctagctagtctctgtctcctcagccctaaaagcctgaagagattcagtcctgctctttagaagttttgagcttttctggctatcttcaaaatctggcaaatatcttgaggggaaaaacagggatttatgtcaggccctttctctctctcatggaatgttgtctcctaagtcccgtgagtttagcagaaatttcattccaaccttccatcctcatttcccagccacctgagctgcatagagcacttagcagtgtcctatgcgttaaagccaacagtcacttggcttcttatatttcaggcttctcttgtttccaatccatcatgccagccctgcacaactgccaaaagtgctgcttggtttctgctttctccagtagacaacctctgcttgggccaatgccagtcctcaacccacgtccagaatcagcagttgcccacagggaagaaaactgtcaggagttatcagcctacagaggacccactttgtcctcatttccacagctttctgatgtcttcaaattttctatttttgcggcttttctttttttttcttaatagttgttgcagtaggggagtcagcctgccacaatctactacatcttacctggaagcaataccttatcttgttatttttaagtcaacaaattagacattattattattaatatatacagcaatatttagagtcactcgcacataaatattaatttagagttaatcacatatttgctttgtattcctttttgaatctctgactttctatctgtgctaattttccttctgactaagccacatcttttagaatttcctctgtgaggacctgttttatttattcaaacataaaaaatttgtttgctctcattcttgaaatgtaatttcactaagtattcatttacagttggtcaattgtttcctcttgacacatggaaaatatcattcctctgcctctggctttcattgttattgttgagaagacagatgttagcctaattgctatttatttgtagatggtctaacttttctctctaactacttttaatatttctccgtcacaggttgtgatgttactttcatcttctggaattgttcttccacatcttatcatcgtcttccattatttccatctttgtctctctagcttgttttatttataactatctaagagtttactaattgtctccttagttctttgctccatctatatctgtccattgtgacttaaaatttcctttttttaacttttattttaagtttaggggtacatgtgcaggatgtgcaggtttgttgcataggtaaatatgtgtcatgggggtttgttgaacagattatttcatcatccacatattaagcttagtatccattagttatttttcctgatcctctccctcctcccaccctctggtgggccccagtatgcattgttcccatctatgtgtccttgtgttctcatcatttagctcacacttataagtgagaacatgtggtattcagttttctgctcctgtgttagtttgctaaggataatggcctccagctccatccatgttcctgcaaaggacataatcccctttttaatggctgcatagcatttcatggtgtatatatacctcattttctttatcctgtctattgctgatggacatttaggttgattccatatctctgctattgtgaatagtgctacaatgaacatacgcgtgcagctgtctttataatagaataatttccattcttttaggtatatacccagtagtgggatttctgggtcgaatagtatttctgtctctaggtttttgagaaatctccacgctgtcttccacaatgtttgaactaatttacactcccaccaacagtataacatcgctcctttttctgcacaacctcgccagcatctgttattttttgactttttaatagtagccattctaactggtgtgagatggtatctcattgtggttttgatttgcatttctcacttaaaattttgaactaatgtatttttcatttctagatgctctatatggttatttttcaaatctgctaagacatttttatagtgtcttattacttgctgaaatgttcaaacctcttttatttcattaagcatataaattttgccatctcattttctgtgctaataaaaattctaatatcggaagctttaataatcagattctgctatctctttttcctgcaagccttatctcacagtaccttgttttcttgtgtgttttacaattgttgacagtgaatattctttagaactttatccttgataattattagaggaatgaattaaaatttcacttctccggaaagtactgtgtttgcaccttttaataactcaagagaggtaacaacccaagttcattttcaattaaaattttcatttgaggtttttcagaccacaaacccatgtgagagctcacatatggttacaaattcttgaagaaaatgaggctccttccttccccatccaccttcctagtaccaaagtcaggacagacaggttttctgtgttagttcacttctcattcacctttgtattaaaggtctagctctttgaggttcaagttttatgttgggacctcttcccacttggtagggcctgggttttacctactgggtttctaagcatattttgtggttaacatcagaggccaggagactcatcagtgtataattaattcttgtataactaattatttaaaggcagtggacctattcactagcaccctgctttcggagtcactgaattcatgtttgccctcagctaaagccatcctgaacctctttagatgggagaaccctgatgctggtacctgtagcatgggggctggggctggagaagccaagtagtacactagggacctcacggtcactgtgagggatgggggtctctgcttggcttctgaacacccaaaagtaagctcttctgccttcactccatgtccactggagcctgggatcctctcataagaagctatatttactctaatgaaaaaaaatctcacctgggctgaaaaagcgtatgctatacatgagccttggttaacctaaactttcatccagagtttcaaggattaaattcctaagttctttttaaagcaaagagaagttagttccagtcctaggccatgataatgctcttggctgagaaaacctccttcgtttttttaaaatatggattctgagggtgcaagtgcagtttcgttatatggaagtattgcacagtgatgaagccatggcttttagtgtacccatcatccatatagtgtacattgtacccaacaggtaattcaccatccctcaacccccctcctctgttttaaggaactggcatttatgcaactaattgataaaattatcatctgtctcttaaccagattaatagtataattaaggaaatctgggatgatgatagcaggtttactgttgatgaaaccattgaacacttgatttaacccattaacagtgtttctgaaagtatgttccttgaaacactagaccatgaaaagtcctttatgttgaaatatgcttaagaaatattatatgcttgaaacttctcttggaaactcacgaagtatattagacattaaaggctctaagaaatcctgcaataaagaagcctatttaattttatttgactcggtgttttcaaattatgtgtgaccacagaaatagaaggaacttggaggagtaataattcattttttgggtagaattcactactgtcacagatatttgtatgctgtcaatgaacatttaaatgtggattatagagaaagtaagatttattcaacaaatatttgctgaaagtccactatgtgcttaccactttgagtatacatcggtgaataaaaaagatatagttctgtctcatggagcttgtaggagcattggactgtcgtggaggcattaagaaagaagtagcaagtgcctagaatccagctgcccctcaaattgttggatcacagccgtggaacaggccccagagctgggaagttgactgggcagttggctgttgtatccagcctgggagatgcaaaatttattgacataactgtacccctcaagaggaccataaagaagaccaagcagaaacacacttggttctggaacagaaaaaagtttatctaggaaaggaagtttaggaaagactgttagataagaaactgggtggtttttaaggcttgcagaatctcttattgatctgagaattcctcccaaaacaatccctctaaaagtgcctgattcataatccagtgaatgttaacaggaatgacgatgatgattatgatggtgatgatgatggcaatgatgatgatggtgatgatgatggtgatgacaatgatggtgatgatgatggtgatgatgatggcaatgatgatgatggtgataatgatgatggtgatgacaatgatggtgatgatgatggtgatgatgatggcaatgatgatgatgatggtgatgacaatgatggtgatgatgatggtgatgacaatgatggtaacagtgatgatgacaatgacaatactggtgatgatgatggtgatgacaatgatggtaacagtgatgatgataatgacagtactgatgatgatgatgatggtgatgatgatgacaataatggtgatgacaaggttgatgataatggtggtgatggtgatattggtgatggcaatgatgatagagtttaatctgcaactccttcccttcactcaatgctatggccaattggccaccaagaactgtgagtctacttcataagtaactaactcttaagctcatcctttaatttctttggaacagggcttaacctttctcaacagccccctcatctcatttaccttctttcagtgtgtgttcttccaatctgtctccacactgtgccaatgtaagcttcctaaagtttaagtctgggtacaggcgcactcactcactccgtgcacttttacacttttatgccttttttgtgttcttctctacttgtgttttctccttcttgtcttttagcaagacatgtactcatccttcagggtccagctcaatggtgagagcctctctggggctttggctgatctcaccctggaatgcactgcaatgttcctttgcctaggttcctgcaatgctttctccatttatctgtataaccctcaccacttctaagattacgttattatctgagtctgtggtgagggaacataccacatctgacctacggttcattgccagccccctcccagagtggaacactgaaggcacatgggcaactgttgcaaacgtgcagggtaaatgcacccccatggagtgacagctatgcagaccagagcccccttctcccaggttctgtgttgcccacacctttcttgacagtcctgggccagggcttccccaggtttggaatccagatgagtctgaaagcaaatgtcattctctttccttcaccacacagtagcatttgttcttgccaaggtagctgtgtgtgtgtgtgtgtgcatgtgtgtgtgtgcttgagtgactgtgagtggttgtgagagtgtggatgagagtgtgtatgtgtggcgtgtgactgtgtatatgagtgcatgtgtttgagtgtgtatatgcgtgtgtgtgtatgtgtaggtgtatgaatgtgagtgtgtgtatgttcaagtatgtgtgtgaatgtgagtatgtgatgtttgagtgtacgtgttagtgcatgtgtgagactgtgtgtttgagtgtgtgtgtgtatatgaatgtgtacgagtgtgtgagtgtgtgtatgtatgagtacacgtatgaatgtgagtgtgcatgtgtgtctgagtgtgtgtatgtgtttgagtgtgtgagcgtgtgttgtgtgcgtatgtgtgtgtgagtgtgagagagaatgtgtgtgtgtgtgtgttcatgccgatgttcacgatgggctggagggaggaccagtcccctactgcgtagatcgaggatgctgcctttacccagtcttcatgaagttataaaaattacagccatttgtcacaggtctctcaacacagcactgggccctgggaggaccaggccacatctcttggcgtctgaaataaatgaactcatttattcacacattgaggccacacatgtttgttgcaagtctgtggccaggcacagggctgggagctggggaataaagagctgacccaaacagcagaaccagtttgcgttttcatggaattcatgatccgctgctctgacagtgggcatgggtcagacaatgaccaagtaaacagatcagtaagatcatttggagaaacgagaagggatccaaaggaaagaaagcaggaggccacgaggaggggagtgtggaggagtgaggggctgctttaaattcagaaatccttgaagactgtctaaggaggtggcgtttgtgttcgggcttccataacaggtagggggaagatggaaggctgctccagaccagtcagggagaaggggagtgagggtggttgtggttggaccacaggaaatgcaggaaatgaaagggagggtggtaggaaaggcaagggctagaccgcacagggcctttggggccagcgaaggaagtggattctatcctgagtgcaactggaggccactagaagggcttacgcaggactgacaggctccgattgatgcttcccaagttcagccgtgctgcagggcaggaactgtaggaggagatagcgtggcccagaaaggcagtcaggagctgtccaggccagctgacgctgacgatgagtggggcccagagcttagactccctgagactcagccctcctctcccgcaggaccccagcagccagccttggagggctcccaaagaatgacatcaccctcagctcccagctgcttgatatgcagggaattcctcccaaggctatgcagaggcctcaggcttcagcagcaagctgcggcccgtgcctgggggagagaggaggggaaaatcgtaaccccagcagcacctcctcccgtgacctagactctgggccagacaccacaggcattttctggataatcctcacaactgccccatgagggacacctctgtcgaatcataaaatcctgaacagggaaggatgcctggagatcatgtgacctgtacccctgtgtcgaaacctgtgtattcctggttcttgtttatttattcatcatatccttaaataacacccttactacttttcaatcacttgaccaatattaattttcatagccacttcagaaggtcagaactatcattattcccatttcatggatgaggaaaactgaggcccagaaaggcaaagtaacttctccaaggtagcactggccatcatttacatctaggcagactgacccagaatccatgttcttctaggctgtacatgataccacctgctctcggttgttcatgagctggcacagtggaaagagctctcctcagcgggctggagcatctcttgtacgcccagaggtgtgggtgagctgttctgtggcacaattgtcatcctggggtctgcgacggtaagactcacctcagaggaagggctggcctttcattcctagctgcaattccttacaagtaagaaggagagggcctcaaacaggaaacctggggtgaagaggtgaacctcagatgcctatcttgtttaaccttctgtctccaggcttagcacagtgcctggtacagaggaagtcctcagtaacattgttgagtgaacggatggatagatgtgtgtggacccgggttcatccttcacatgagaaagtccgtgagatgtttacatccaactcaatatctagcacatacaggtggacaaggcagaaaggcaatgtcatggctcttgccctcacactctagggcctagactggtgtgacaatgtccatgcttacatgtcctgtctaaggaaagcagctcccgttggtcatgcctgtggaaatgtggccctgtatggccagctcttctgatttttcataagaacctggatggacagatgccatgcaaagtttttttttttaattttttaaaaatcgtgtgtatcccaaagaaaatattatctaagggtgaaatccagcccagggggcactagtttgagatgccaggtctgggatcagtagcaggtggcccagaatggggactgggttggtgaagactaagaagaatgagaagctccctggagcctccgagaggaaggtacattttgcatgccagcttatccggattcgagacttgctcgatgtttattttctggttgtcactccaggattttagttaagtcttgtctaacattgcagccaggctcagccattctgtaggaggattaaaggatgggactgtgtataaaattgggccaggatggcaagcgagggagcagctcttgaggccagaagagtgggggaagatggcttgatgacagacggaatctcaggcacctgaagagtcttagaagccagatttggggctgagccgcccttccccaagtggagattcaccagccatggccagactcgaggatgtgagatttatttttcttaagatagcaaatgtctttgcaggcatgcttcccagttgggaaattctttttatgctccatgtaatccgtctgccagagcctcctttgactctgtttatcggttctcttcctgtatgtgtcatgctctccttccctctctcctcttctccccttctcgtcaccacccctttgctctgcaccacccagagcctgttaggaagaaaggggggatacactcatcctggctccatttagggtgggcttttaatccagacatgtcgctgacaccagcatttgcaccaggtatttaattagaccaggaagtcccaggggatttgagaagctggctggcgaggaatgggctctatctccatatcttattttgacaagcactgtaattatccctcattgctggcaggcggagcagaatcacgttcgttcccagccccatcttctcagaacaagagtactcaggctcctggttgctccaccactaaacaactgcctgtctcagttccccagcgagaccgagactgagctcagccattactcaggagatcgcaggcgggcgctcagcctactttttgacagcatcgtggaggtgatttcagagcgcttgctgcatgcacatgggaaatagcttccaaggaggatctttgggggcagaaggaatgaggtgggcaccatgccctccaaaaagacagaagttacccctccaggagccagcatgaatggagcacctaccatgtgcccatttggtattgaatttaatcttctcaatagcactgccaggtcagtgttatcattccatattaccaatagggaaactgaggctgtaagtgaggaagctgcagagtcagttgcagtggcctcagaattccgaccaagagctagctggccccacggtttcttcccttcctactttacagcattgtggctcagggagagcacacatgccctcatgctctgccccaaacaatttgtgggtgctggaaagttctggccatgtcaggagcaagtgctttctcccttgctgtgctgcccaaaacttctttaaggaggttaccctcatctgtcaaacagggatgtccctgtctgtcccacagagtcttcatgaaatgaactgagatggcatattttaaagccctgggaaaaccgaggcagcctcgggaatggtgacgtatctggttattgagactgtcttataatttggggcgtgaaaacctagggctacagggacacaaggtaatgagaggaaattgccaaggaaagcgaatgcaaaggaaacaccacccaagcccagcctggcttccaggtaccctctgaaccagcctcctgccccactgtgggccagaatagaccagcctgctaggaaaacctttggcccactgcaacaatgacaatcacaacaactcaaccgtttagtgaacacaaaatatgtacgaggcacgggattatgcacaggaaccacgtccgtacatttcattctcaagatcctatgaagtaggtgttattatccctatttgatggatgagcaagctgtggttcattaaaccacatcccccatgtcaaacagcaaacaaggggtgaggccagttggtcttgacagtttgtcaaaatcgctgtgctagaaaaccaccctccttactggttgtgttccaggggttcccaaactcaagttcttcttggaggagctgcaagaaatgatttgagggtgatagcaaggaagaatgcatctgagatgccaggctcaggagattcctggagtcctgcactgtgtgccctttggcccagaaggcccttgtaagcacctttaggtgttgtctgcatttcccttccctttctggtcagggaccccagctctctctgcatggattctcctctccaggaggtggggggtgggagccgatgtcaacagggaagaggggcagaggaacaaggacagggatggggagaggaagaaagaaggaggtgggatgtggcagctgggcccggaagcaggctagagccagctgcacagctctgacaatctaaagtgtctcttccgatggtctccattcagccccatctgcagatagctcattttgtgaatgaggcctgggtgtttgttccagaaccttagctgtgattaggaaagacaggagcacttgggaggccccaccttcaatgcaccagagtatttctagaccctcattctgcagtcagctctagctgccacatcagggaattcttgctggtctgtagcctggattccaattgtggatgtggcctgttaaaactttcctgggtaggacagtgtgggcgttctgccttaggagtcagacaggcctgagtttatatcccaccatttccatatgctggctgtgtgaccttgaacaggtcccttagcctccctcagcagtggagtggaagattaagtgcacagactctgaagctaagccttctcccatgctccagtcccagctctgccacttactaactgtgtggccttggcaaagtgacccaacacccctgggcctctcttctcagctgcaatacagggctaatacaggcatgcatcttatggagttgtcaaaaggatgaaacaaattcatgcatttaaaggacttggcacatggtgagtgctcagacatgttagccagtatccaggcatggtggctattttctggaataaatatggataaactgagacaactttctctcctgaagatgggtccattgcgaagtcatctcaaagaggtgtggcctggagaagtggttccagtacctcatgccttcttccccttccctccttctctcctgcctccccctgcattcttcatgtgcctcctgctgtaagcatttgctgagcctcctgctgtgtcccaagctctgtgcttggggtcaaccacccagaaatgaatcgtgtgggtcccatcctctccaagacaaacagttagaggatggtcagatagtgccagtggagagcagggaaggcctcgtggacaacatcctatttgagccacatgaccatcagggaagagcatttctaggcagaggaagcagtttgtacaaaggccctgaggagagaacaagcttgagaaataggaagagtgcccgagtgtctggagtggagggacagggagaagatgggtaggaatgaggttgagaagtagctagaggtcaaatcatagagagctttgaagccacagtgagaaatgtgggcttactttgagttttctagcataaggttgttctgaagattaaatgacaggagacaggtagagtgcttggaacagcatctggcgcattgctgggccttaaataattgttacttttattatggtggcacttatttccatattcagccctgaggctggctgtggtctactaggaaattattggcattctggtttaggagagaggacttgacgggatttgggtgacaagtctcagttctgcccttccctggcctagccaagctcccttccttccctgagtttctataaaatggcagcatcacattcccctccccaggtaatgtgacaatgaactttaatgtaaagtgccacccacgatcaaggaatctcatcatttaaactgcttttgccatctaaggtcagaaggcttaaactgagcccgtaattacatcaagtgcctgtaatcctagctacatagaaggccgaggtgagtggatggcttgagcccaaaagttcaagaccagcctgagcaacatagtgagacccagtctccaaaagtaaataatttaagagaataaaaaattaattttttaaagaaggtttaaactggttgtgacctaaggaaacaatttcttccagccgcatcattgaacaggtgggacaccaagctcccttgtagataaagatcgaggtggaatgggagtggacactgactccatctaagatcatggaagcgctctcacagtgaccctactgggctctctggaagctgcatcccagcagctgtgcagcccctgggaccagccaggagtgacctgggtgctgccgttcaacccacctgtacatttcccaaaaagaggcagccaagtgctgattcagggaatttaaactttaatggtcccccggtctattattatgttttaatgaactggaaaagcacaaacagaaatccttaagagcatcagccgtgacacagaaatctaatacaataaaacaaagtgcttataaaccccagagttgtttaaaacccagaaattgccaattgacatatgggactatatcttcttagcccctagtaaactgagtggcttcaaacaagtccctatcacctcccagggcctcagtttcttcacctgtgaaataagaggatcaaaaaaagataatgttctctctgttctcttccaaccgaggcaggcatctcaagtatttcttagtcagttctactctaggctacacagtatctgtatctggcagctgtatgaactactgttgaaaatcctcttcccaatcccagtttcaacatcactcctcaaggcagcatccaccttcactctagactgaattaattcctctgtcttaccacctaaactcctctagaaaacttgatagaggtaaagataaatgcattttttcaaaaattctacttttctagtcccaaggcattgtgtatatcattcttatgtaagttatcacaataaacccataattagttacttccatttatgtcaaatcgcctacaaagcagaaacatgtattattcatttttggcttcctccccagtatctagcatacgaactgtttgcaaacatgcccagttcttcaaactttgtaacttcatgccttttctatctactacttgggatgggcccaccctccctttgtcctctaagcacactcctattcatccttcaaagtccagcacaaaaatcccctcctctgttaaacttcaactgctccaggctgagtcttatgtttgggtccttcatacgtacccctcttctattgtttggggtattgtgtgctgtgggatctgtttactctcagttctcccctctaggctgggttccttgaaaaacaccctctggacatttcacctctacatcctctgcattcttggccaggctctgagagggcattggtaaatgttaactgcctggcaatggtgatgctgttaacctgatgtgtcaggggtctgaataaagctgcctcaaggtaggcagatgcccacaaccaagcaagaactcaaagctgcaggctcctcagcctgaaccttagacagcgtcttggtcaccatttcaacaccttgaccacatttctcactctcccaaatttcctcctgcttattcctcatccacatacataaggctgtgtctcccaggggaaattcaactacttggtaattatcctgcttcttaagtttggggctaggggattcatagatgatgttcagtattatgctgtgcaatgtagatgcttcctaaaccttctcaggagctaccactgagtggcacctggggacctctcaggaagagccagttttctgggcagtgtggggcaggacagagctcattaaaccagcctaccacctgtcttccagctcctcctctcagcctctgggcttccagcagaaagcacacgagagcattcttgttggttttcttatgacttgagccagcgagacgtacatgcccagcacctgttacctgggctggctcttggctgagagcatacatgcattgggtcaggtttcagatctgctggaggaacacagccagaatgtcttgacaggcagccctggcaaagccccagaaaatataagatctgagtcttatgatggactctgtgaccttgagcctctcacctcgtgaccttgggcatctcatgttctctccacaggtctcggttctggactccttcatgggagctgtcatgcccctgtcacacagcagtgttgtgcccccggggatcagggaccaggatggtcctttcttggtggtgaagggggcattttgcatattccagagattcaagtttccagacctatctagaaagaaacatttgagtttacaggttggcgcttctcagcctctgtctctcttcctctctgttcatctccctctgtcccctctatgtatgtttgtgtctctttctgtctcctctgcctttctttgtcatgtctttctgcttctgtcctatactgtctctcacctccaccctggttccccccgccccagatgctcttctctctgtggggttttttcttcccctccatttccttctcctctcccactccttcctccccagattctccctcactacaggcttctctctaatctctctctaactgcctattcttctcacaagaaggagtcccctctggggcccagaggccaggcaaggcattgtggacaaggagggcatccgtgccatccaacgggcaggagcccagcctcctggctggtgcgtggctgtgctgtgggtttgtttccacttaccaaagggcatctgtaattaatgtgggcagtgataaaggagctggagatgtgtttatgctccttcgagggctgagatgaaacacccataacatttaatgtggcgcactgacatttaaatgtcaattagaaagtccccgctctgcttggctggcccctgcatcctcagatgagaccgccctcctccctgccttgccagccctgctgggaccaccagctcacaaaagacagtggccacacagcaaccgtgactgaagagtgtgcagggtccaaagaggctaaagtggctttaagagcactccggagggggaggactcttggaacagagaaaggaggaggatggtgccaggccaccaccaaaggcacgtggaagggggctgggcaaatggtgaaggagcatgtgggagacaagtttagaggtagcgttggcttcctcctctcttccctcagtacctacagggcagaatctagagcttgtttgtgccttggcccttaggcgctatgtttctgcctctgtggttgatcaccctccattagaccaagggcttcttgagaccaggttcccatctcttcatcacacaggacgcctatgcacacacggtgcctggcacacagtaggtacacaaggtagtctattcagttcaatacagtatatattcgttgagttcccactgcgtggtgggcattatcctaggaactgaggctacaacaatgattgggactgagacctgcccccacagagtgtacagatgctcttcaaattaccatggggctacctcctgagaaacccattgtaaatcaaaaatacagaaatcaaaaacgcatttagtacccccagttaatccatcataaagtcaataaattgtaaattgaaccattctaagtccagatgctccttaacatacaatgaggttatgtctcaataaacccatcataaagtcaaaaaatctgaagtcagaccgtcgtaagtcagggatcatctgcgttacatttttaaagacagacagaaaaatagatatgtggcaaatgtttagatggaagcaaagaaaagaggcagccggcccaccctggatgacaagaaagcttcttggaggaagtcaaatagagctgagacccaaagaataaatgtgcatttgcaagacagagaggcagagggaatactggacagagggcccagcacaagtgtggagccaggagggagcctaggagtgcacaggggttggtggcaatgggcacagcagcttccttgtgaaatctgagctcagagaccacatgactgcatggggttctgcaaccagcacgtgagctctgtgagggcaagggcctcatctgtcttgtccactgctgtgttcccagagttggggaaagtgcttgatgtgtagcaggcactcgacaaacatttattggatgagtaaatgaatgctgtcttcactggcctctcctcccttgtccagttcccaaagctcagtgggtccccgcaaatgcatttattttgcaaaagcctttcccaaagcctggcatccaatgggtgcctcatttcctcatcccctgcacgccgtctctcagtccctgagctgctgtgcccacgacatgctccattttctcataaaagcccttccaacaaggggcacatttgcatttcaagtttcctggaattggagtacagagaaatctgacttccagagcccagggctctaagctgcagctggagaactgaaacacagcaagcaggacacctgcccagaataaggttcaggccctggaatatcacatgggacccatgctcctgtagctgtctgcagtctcgagccccaaggcagtagaacaggtgttcatcttctcctgcactctggaaatggagtccagggcctgagctactgagtttgtagactgcaactttggtagcaagaggcatttctcctcctcacctccacccacacacagatctagttcccctcgtacgctgccctttcagtcttggacactgcagaagacctgctaggagagcctaagaaacccaaagccttcccacctgccatccaccaactatcatttactcacccccactcctccagagtgcagatgactatttcacttactgatttggcaggcgctgctgctcctcaccttggttggagtagagtttaccctgcccagccctgcaggcccagtggtaaagggaaggaggctagtgattattccgactttggatcaatcagttgctcagtttattggaattacatcccagtggctgctattgatggaactgctggactcgggcccacaatcctcatgccagttttataacactgacatcacctgctcacacacagggcttcctctcccatcctgtccccatacctcactctgtagcctgagatttctaaggtgggggatctgcactgggtgtttggcataaatgatgtaagagatttcctttgtattgctctcagctacatcttacctttgtgtaagaatgcaaagtcataagcacagtttacaattgcaatgggaggtatgtgctagttttaaggtgttttgtttttttttttgtttgtttgtttgtttgagacagtttcactcttgttgcccaggctggagtgcaatggcacaatcttggctcactacaacctctgcctcccaggttcaaacgattctcctgcctcagcctcccaagtagcttggattacaggcatgtgcccccacacctggctaattttgtatttttagtagagacagggtttctccatgttggtcaggctggtttccaactcctgaccttgtgatcagcccgcctgagcctcccaaagtgctgggattacaagcgtgagccactgcatcaggcgttttaagtttctaccatttggggcatattcaggaagattcctatcccaacacaccccttccttctgcttttataaacacacagagtccccaaccaccctacgtcctctttcctccataaccacgtcacagtgcactgtaaacacattacgaaccagctatgcaataacaatctgctgaatctcagagatgcagaaagaaatcactgggccttctattgatacattcttatgttatcatttttaatttctataattatgtttttaaggtacattgtgtatcagcacagcagcagatgctaataatatattaaaaactgtactcgtgttctgggagtgttcacaaattatagcttcacactattctcatcttctcccgcctctgctcagatgtccttgaaacatctctaaggatcctggaaggcaaactgactacaacacttatttgcacagcacagcatctttcctatgacacgtcttttggtttttccaatcatcaaaagcaagaggtagcaggagaccgagctgttaggcactgaccgtggcattgcctccagggtgaattgcgggggcacaggaaaaacagctcagattcctagcttttccccaccttcctgatctactgaaccacactttctccagggatgtggcccgtgatctatattttaagaaaacacctcaaataacttcccagccaggtgtgtgcaccacagtgctgggacgtggtattgttcttgccatgggaggtgggagattcttgtccatccttcacccagaagcctgcatgtggtttgtcaatttttttttattttatgaaactttttttctgtttacactcttgcagaacaaacagacaaattatatagctgatgtcacatccctttgaaaaatctatcaggtttcatccattcattcaacaattgtttttaccagttacactttttttttcatttgccatatacagaaactgaggctcagtgagactgagagatttgtttctgacttagcttgtaagaaagagattcaggaactcaacctaggttacctggccccaagtcctgtgcccttttaattttacttccgtacattttaatgaaatggctgcgagaccagagctctgtgtgtgaacaagttgtgcctttcaaccttcctttatctccccttctctttccccaccaccaagagcaggctgatgagaaaattaacattcaggacacgttctgctcccttctgattcccacagagagaacacagcctctgcctgccaattagtgacgttcagatctctattagagatggggacagctagttccagttatgcaaatgcccttgtctgagagtagccatgggccagcagcatgccagtctcacctctccccatggagtcaccatggatgtgacttgcacctcccgtgttgctttaaccaataatcaaatcagtatctatttatataagcactggccaaggtactgcaggaagctcagggacagattttatttcagcctaaaggaacttacactgagtagagagtgtggccagggaaagggcagatctttcaaagacactctgttcttctctaaacactcacagtttctatttattacccaaaaaaatacataaggaaaaatacctaacatttgttaagtacctactatgtgccaggcactgttagacactttatacacattatctcattcaagtccattaattttatataagaagcaatatgctatttggttcaaggcatgtgttttaagtaggaaaaactaggatttttaaaactaggattttaatcctgccactttctccatgtgggacttcttgacctcagttattcatctgcgaaatggaaggaaacaatgtctgtttgccaggaatattttcagaagcaattagataaggtatttaaatccaagcacctcatcttcatatgacacagcatagtgttaagatgcctaatatgtagggaaatgacaaaaatggacaaatgcaggatattattagcaacaatgcaaaaatatctgtatatggatgaagagtggaagaggacaattatgggggaaacttgttgtcttttaatttctgaactatctgtattattattattattttagatggagtctcactctgtctcctaggctggagtgcaatggttcaatctcagctcactgcaacctctgcctcccgggttcaagcgattctcccgcctcagcctcccgggttcaagcgattctcccgcctcagcctcccgagtagctgggattacaggcacctgccatcatgcatgactaatttttggttttttgtctgtttggttgtttgtttgtgtgtttgttttgtagagacagggtttcattgtgttggctaggctggtcttgagctcctgatctcaggtgatccacccgcctcagcctcccaaagtgctgggattacaggcgttagccaccgcgcccggccaactatccgtattattatgtattttcatttaagcttttaaaggaaaatggaaacactgcattaaactgagcctcagagaaattcagtgacttgtccaaggtcatacaaggactggagggaccaaggcaggatctatccattttcaatgcccatgctttcccccacacaccatgccaccacatgtccctcaggaaacaggtctgcaatgattcaggagacctcgtagtctacattgatagatgtaaacagcattggtttctgtcttagagagtgggccagtgaggaaggcatggatcaaagcaaaaagaaaagccaaggagggggaggatggagattaaacaggtccctggttgtcaggggcaaaactgttaatgacggtggagcaccatgaaattaatgacccacccaaagcacctgagaaattgaactggttattaaaatgcaaatcataaaccaggaaaaggaggaaaacaagcacgaggaattaggaagaaggaagatatggcatggagtaccacgaacagaaagtctgtggccagcacctggatattcagagaaagagtgtgatttaggcttcagaagggcaggggtctgtagcttagggactgggcagagctgttacctagaaaagctagaaacagaaatgcataaatcccagttgtccctgacagtgggatacagtcagggcctgaagtgcaggggaaggccatcttaggtcagaggcagtggttcttggcatacagtggttttccccctaagaatgttaggcaatatttggtgacatgtttaatgagcacaaccaggttaagtatctactcactgctaatctctggtgagcagggagaccaggggtgctgctaagcatcctacaaggcctggggacctccccaccaactacagttatccagtccaaaatgccatagtgtcgctggggagaaaccctgatctaaggatgagtgagaaggtggatacaggaggtgaggaggtcagaagtcagaccaaacatcagatgggaagctaggaggaaaagaggtcagaaaaggagttatgaaccaaaggacaaaaggaagttaagtagtcagtcaggagatgaggatcatagaggagatcaggcaaagagaagtccagaggtggaaaaaagcttcagagctcagacgggctgggctctaacaatcatcacagaagcagcaaagatcaagaagcaatggggaaggacagttgaggctagcgccagggggaagggccattggtgaggagcctttctgatcagaagttggatggagaacaccatggtggatgtggatggaggtcaaagtgatgatgttctggaaagcagtttaaacaaaacaaggggcctgcgtgctttactaccagaggccatctgttaatggatgatgggaaatgccactcttggcccccacagtcaggagcaggtcaccttcaactgggcacagcaacacgtcccactgcaggcaggcacaaaagcagaggctcattaaagagctgccctgggcccaggctacatccttggcaaaggatgagatttgcacccaaggtcaggatggctcgggtgtgtggagcacgggctacggagccaggtcaatggagttctaaatccctgatcagcaaccttctacagatgtggcctttgataggtcactgcctctctctgaagctcagtttcctcacctataaaaatgggatcgataacagaggttacatctgtgtggatcacctaaactgtagaggattttgcaaatgtgttgttgtggttgccattcttattgctggaacataattccctcattagtatttctgagtgctctggtgcatatctgctgcagcagaatccttcatgcatccagcaaacatttcctgggcatgtagtatgtcccagacactgtgctgaacactaagattacatggaggaatagagattaatttctgttctttgtttactaagctcctaggggctgaaaggcatcttaaagtccataaacttcctcctgatgcttaagtaccctccacaacatcccacttatgtgtcctgggcttgcacacttctggtgctgatgagctcaccgcctcctgagacaggtgattccttctacagaccactcagactatgagaaagttcatgccgggtgcagtggctcacacctgtaatcccagcactttgggaggccgaggcgggtggatcacctgaggtcagagtttgagactagcctggcgaacatggtgaaacccgtttctactaaaaaaaaaaaaaaaaaaaaaaaaattagccaagcatggtggcgggcacctgtaatcccagctacttgggaggctgaggcaggagaatcacttggacctgagaggtggaggttgcagtgagccaagatcacaccactgcactcccgcctggttgacagaatgcgactccatctcaaaaaagaaaagacaaaagaaagttaatatatacctgtattgagctgaaattctggttctggccctttctctgcggctacccaggcttgtgttttcatctcccacattacctcctattagggactttaatggatgacatattgtcacccagcctcctctgctggatcgggatagctttccatccagacaaagaattttcatgactgagtgaccatccccaggatgggctttggtgtctctcttccctcagaaagtgggaagctccaagtgctgccccctgaaacccttttccagtaaccatggcctccaggggtcctggggtgatctcagaaaggtagacagacctctttagcagtaacctggaatattttgctaccttcctgaaatctagagaacagagcaactttgcaagcttcttcaaaggagcccgttctgacccaggtcgatggagctcccaaaatctgcacccccaccccccgctgctgtgtgcaacaggagaggggctttcccggaccagcttttccagaaacatgaattctttttgacacttggcaaacatttggggaccctctcagacctcactctgggcaggcccgaactgtcttttccatgccagagggcagtccaggttcctatcagagttatttgaataatcttcccaacacctctgagctgcagtttcttcatgtgtcaaatacagataacaatagtacttcactcataggattggtggacaaagtcagtgaggtaccaggtggaaaaagaggtagaacaagctgggctttgcggcatgccaccgtagtcctagctactcgggaggctgaggtaggaggattgcttgagcctggaagttcaaggctgcagggagctatgatcacaccaatgccctccagcctgggagacagaacgaagccctgtctctaattttttttttttaaagaggttgaaaggtgtctggcacttagtaagccttcaccctagttagctttgctaggattatgatttccatccagacaaagaagttgccctcagtgacgttctagcagagtcatcaaaattgggttaaaaggaagcaatttagcatggagcgagcctaaaaatgcaccaaagtaatgaaaagagcaaagcatctagacatttgatatctggctgtttttccctaggaccattgtcatggatggggataggagagccatctaaggtccctgcccatctgcaacactctcctgtttctgctccgatgctctacgatgtcgtacgtggcagagccagcccagcgtggacttcagctctcccagtaactggctgagtgatattagaaaagtcactgagcctctattttctataaaattaagaaaaatcacactcccttataaaatccttagggaaattaaagatccttgggaaaatagatctcttacaggcatatcttggatacctgatcaatgatagctgctatagtcttcttctgatcatgcttttcataataatcatcttaatcattactggcattcaaagccatgaagcacctgggagaaggagaagctgatctgtccatgcctgtctcctttggaaaatgcacgctgttacacttccccacatgttcaaattcatactctctcccccacccccttttttgagtgcccccaataggcacttgagaaggctgaagctgggattgtaaactgccagatctcctgccttgctctcaccccttgttccaaatcttatcaaatattaaaagctgtgaaatagaggcaggttttaaatcattttaatcacagcattcctcagcctgctcaaaagggctcaaaggaatcgattcagaagtggtaattatgactgtggccccgtgccaggcggcgggtcagcattggagcaccagcgacagacggccggcactgactggggagggctcctcccaggtggggacaccgaacaggagatgcctcctgggaggaaataaagctaagtcatcccaggctgggtatcaggttttaaaattcataaccaagtcaactgaaaatcagcttacctttattaagtcccccactaagtgccagatgcttttagcctcatttaaccctcagataactcctggaggtatgtgtcattatcctgatttataagtgaggaaactgaggctaaaaaatgataagtagtgtcccaaagccaatcaaaaagtagctcaactagatctatccagcttggaagcctgcaatttgttctctgtgttttggtcacgctcagattctgaggactgctgcaaaaatgttgaaggaggtgctacccacaggtcccctgctgtccttctccagcctccaccatctgcccggtcctcactcactttcctccctcttcccccacattgtcttttggactctggttgactcttgctgtcctctggctactgggattcatccatgcacattagaacccagttaggtcactaaccctttgaccatcacagcccagctgtcatatccctccctagactcatctcttccctggccctttcacctccatgctgtatactccagcaagacttagcttcctccagttcctccagcacctttctctcctgccttcttgcctgtgcgcaggcttttccccaactggagcaacttgctctgtctccacctccaggtctcagttgaaacatcacttcttcctggaaagactgctgactcctaggtatttttcccctaatttataccaccgtggccagggcttttctgctatgacggcacccagcacttggttggggttacttgtttgaattgttgggattccttttactggccagactggaggaggacagagagcacgtccatctgactcaccacagtccagggctaagcagggttgccggtacatggcaggcactcagtagacaatggctgagtgagttatgtcaataatgggaccgtgcttaaatgtggacatttctgggggctcagggaataggtcattctgtgggccagacaaagcatgcaagtgagcagagctggcccttcgcctacaaaataccgaagaatattcttcaatatcacaagaaagtatcttttccatcatttttcttgaaaaatgcatccctcctgatctatctttcatttcctcacatttaatagagatgtgaatacagagaactatatctctactataagacaaatagcaccctacgcacagtaatgacagcccaagtagtctacttgtaggaacaatgaaaggaagtgatgggggctggggtgaatggaggtgcaccgagcctgtctaaagaggctgctgcttctcaacctcagcctggtattgcccaaggaaatgtgaaccagtgcagccagatttcctgacttcaagaggagctggaaatcgactgtatgcgtaatgtcccaatttttaagagctgcctcaattgaacacgcacaggcacaaacaaaaacaaaataaacaagccaaatgcaacatctgctgagaggttttggttcttggattgcaacctctgcacacattttcccactaaataaagaaaagctccttgcagatggaccccggtgggacctccaatacccggaatgcaccgaatggctgggatttgtgtggccccaaaaccctcccttcttgcgctcacagtgctttcttgaagcttcagcaaaccccagcgccaaaggaaaaatatttataacctgactaggcagcgcttaaaagatcaaggcatacgtggtgtgcagaaatcactcgcacattgttcctgtttcctctctgccataggatcaaatgcttccagtttcaatgattaatcgcctctcagttttcaccacaagttgtacaatgttattgactgaaacagaaatattcatttcaggactctgctgctggaacaaacacaagctctggggcggggctgatgatgactgatggcacaggttgctgcacatgtttctgtgctatcggattcaaaccacccctgagactgctctctttacagatgggactcagggaagctcaaacaactatccaacaacaatcatttagtgtgactttattaatggccactatccatggaatgtttactctattccggatacggtgccaggaacattacctataccatctcatttaagcctcataacacccactgttatatttgggaaggagccttggcagtaacattttatacttgaaataactgaggcagagaagcccaaggctgctaagcagcagagcagaggggccagtccccagcccagagctcccacctcggctctggcattgctctcctatgcaagaccctgacacagacacacacagtcttttccaagctggctgggcaaggaacaatttcttttgcagaaactcgagttactacaaggcttctgtggacagtctagggtaatattggtactttaattatgcacctggtgtgttatctatccttgggagttgggaaaggtgatgctctggcggtctggggaaatctgccctctgaaattcgagcactcttgaatctcttgcctggggcccaattgagcatggttgctctccaggaatgtcccagggcagtgcctctctaactcaaatcctgggagatattctccagcgtctatgaattctccaggtaacctctttacaaaatttaaaatttttcatcaaataataatcatgtaaacatcaatttactattttaggttgtctgttttaatcaccttataaccatctatgttgggggtccacaaactacagcctgtgaactaaatcagcttccaacctgttattctaaggtctactactgaagaatggcttcatggtcttaacccattgagaaaaaaaaaatcaaaagaaaaataatatttcatgacacttgaaaagtatatgaagtttaaatttcagtgtccataaataaagttgtattgagacagcagttctcattcatctgtagctgcctttgcaaaaaagacagtggagttgagtcattggaacagagaccttatggcccatagagccataaatatttactatatgggccaagacagaaagttggacaattcctgacctatgcaatgtgatgttagtggcttatgtttgtgcttccagctgagttgggtactctgtctgttgtggttttgttcaagttcttggattgcaacctctgcataaattttcctgctaaatagagaaaaactccttgcagagggacccaagtgggacccccgatacccagaatgcaccaaatagctgggttttttacttttattgccatagggctaatgagaaaaataaaaatagaggaggactcaggcacttagaacatttgcagctacagaaagcagtaagtcctcacattattgtctacaggttctttgatattgcaactttattaagtgaaaagacatataaagaaaccaatttgaccagaagctaattgaaagaaatgagttaagttccttgggcatatttctgggcacaaaaacatcaccaaacttctaaataaagacccaaaacacttgtaacactaagcattaaaataaatatgagctatacatgcatttaagaaagattaagcaaaacaagtcagataattatttacccaagtttggtgaattagcgagtgccagcagtcatagtggtggtctgttggatcaaggaataaatgtttgaaagcaaaagttgtcaggagcacctcctcctaccacacagttcaaaaacaattacagatatggcaggctcgccaagcacttccataccacatggtttattgccttgcatttgtacgattatcttctgctttacaaatttttattttacaattacttttattcattgactgattcattttccaatccacttattccagttcagggtcacaggtggttggagcccatcccagcagctcagggtgccaggaaggaacccaccctggccaggacgccatcccatggcagggcacactcacacacacctacatactcacactgggaccacaccagttcacttcacatgcacagctctgggacgtgggaggaaactggagtccctggagaacacccgtgcagacatgggggaaacgtgccgattccacacagacagtggctctgccagggtttgttgtttgtttgtttgtttttcatcaatgttatatgaagcaacagtattcgaagacctgctgtacagctttccagcagttccaggaaaaaagagccctgggagacttaagccatcacagtacaaggcagtagaggcagggtgaaatagaatggaaaaaaaaaatgtgaacccacactgcagtcatactggaagcagcaatcccatttcaaccaaacaacctcacattaaactaatgttgttaatttgaagtttattggttttgcagtcgtatttgtgtttaatttggaaatttgtttcagttttatagctgaataagagctaaaaagcataaggattttatacctaagttttatgtctgtacatattaagtaacattatggtaaagtcaacacttactgaaaatgtcccctttaatagggcatatgttacttaagtttaagcaggaaaaatgggtttaagaaataccaattgtattatatctttaaatatgtgtgagctgttcaaagttgccacctggcagaaaattcaatctcagttacatagggaagttcctacccctttctaggaaagggtcttgttaaataagaattctaagcttaagttggagacaggttcttgggttggggcagtgatcattttttaatcttgcttgtatgcctacactgcttttgtgtgtgctgatctgtccatcctttaggctgtgctctgcagaatggctcaaaatcacccctcacttagtcctcccacttgcttcctttgtaccccctcagcccactttgcttcttcctctttcctggacaaagggagcacagttgttctcaacgggcctttagaagcaaaattctggcttgactttccaatgtgggagtgggagaggactgctaaaaataattggtctttcttcttagcaattcaccttattacaactgttaggtggaaaacttttttttcgttttactgaaaagtttaacccaggcactgaagagttagattgtatggacctcttttaatcatctgctgagttctccaatgtatcagttagctattgctgtgtaacaaatcaccccaaacgcaatgctctacaacaataaaaatcatttattctgctcactgcctgcagtttattcaggcattggatgagacagcttcttcctgctccatgtggagtcagctgggtacttgaactgggacatggatgatctactttcaagatggcttattctcagggctgccaaatggataccggctatcagttgaaagctataagcaggggcactctgcataagcatggctcatctctacaaaagctcctccccagtctccttgtttgggcctcacagtgtatggtaacctcagggcagtcagaatgtgacaactaaagacttcaggagtaagtattccaggaagcaagatataagctatgtggccttctaagacctagcctcagaggtcacatagtgtaacctctatcacaccctattggtagatattgtaacagaagcccacccagtttcacagatggggacatagactccatttcttaataggtaactggccagagttgtaaaagagcatgtgggatggaagatattgttgcaagcatctttagcaaatacaactggacatacccaatgcaagcacaggattgatcctccactctgcccccataccccatgatttattagccactcggacaagtgacttcaactctccaagcctctgtctcctccactaaagtggggacaaatgagtattacaaatgagaccattaaataagataatacattttaaaaattaacctggtacctgtcacaaagtacatgcctaacaaatgtttgcttctgtctcacttcctcaatttcatctcagtcaacctggactgactcaaaatggcattcttcttggctgccccctttgaagtatttctgctgagaaaatagtttctgtgtatttgtaaatttacaggttgaacatagatcattattcaagcattgctggtcgattcgtcttttcaaaggcgggagctgctggctgtgggaagggacccagcaggggtctcttgcaaccctgctctatgggtgggggaaatctggacctccctctggtggggttgattgaagtgaagggtcaccatatgtctttcccaagagggtgactgacttcctgctttggtcccagtttccctgagattttcctgaaagcccttccggctagcccagttgggagtgttagtacatcagatcccatgctttggtgaaaaatgtaaacacagacctgatttttcattttaaatgaagccaagcatattgctcccagcagatgccgagtgactcaatctgtcctctcggttctgaagggaactgaagaacaacatggtaaaataaagcaaacagcacatttattggttgataaaatgctgttttagtctaccctggcattatatggtgattgctatgtggcgaacatctgttattaaatccagacttctgttgcctggatacattgagtcaaaagctggagcggatgagaaatccatttatgcgtctgttgcgtgtgaatgtcagagctcatatgatgcctttgtcttcattctaactgaatcttttaatatggaccgtctcacttgttaattctgactcaggggcaataatgttttcatttgattaaaaaaggttaaagaaacaaagaaacagtgttttctcaggtgctctaagtaattctgttaatgaattttcggagacagcgtgtgaatttgaaaagagtaggactttttaaagagttcatactatgaacccaataattcagatcctagggccttatcctaaggacataatagaaatgagcacatttataagaacaaagatgttcaatgaagtgttacttacaacagcaaaaaaacttgaaagtcacctaaatgtttgtaagtcaagagcttcattgatattgactgcaaagtccatgttattccatgtgacgaattttttaatcaatcacctcttgatggattttaaattttttacaattttttgctatcctaaaaaaaatgtgtcaatgaacaactttgaactaccctgactaccactttaggatagattgctagacgtggaattactaggacaaagcctatgttataatattcactcagtcaacaaacatgtcttgagtgcccactatgtggtaggcaggctttgctctaaacctcagaggccccgtggcagatgaaaggctctcaccttcacggagacaacagagtgagaaggggggaaagaaaactagaggaatctagtagacagtagcagatgctgaggagactgagaacagtggaaaggctacacacagggatctctgagtgccatggttcagagatcattgaatgaggtgagattcaaagagtctgagaaagtgcctgatagaagaggatggttggctctggagggacagaagtggagggtgggagtgggggaactggccttgcctgagtgtatccaaagagcaaatctttctcactgggctgactgacctcgagaacaggcctatggcccttgtgtttcttcactgccatcagaaagactgtgcacatgaggagatggaagggactctcaaaagagagaggggatcatcagggatgagatccgtggagaatcaccgcagagctggcagcgtttatctaagaatgtggcattgggaaaagtggtgcaggctacattccaggcgataaggaccaagcaatgaaataacaaataagtcatcttaaagttaaaggagatggacaatagacaaacaaatatgtttcaaaacatgataaatgctatggaagaaataaagagggttggagagagggttctacttagatagcctgatcagggagaatctctctgaaaagaggatgttttggctaacatatgaatataacatatgaatattgggaaagagacagtcatgaagagagattgggagcgtaagattccaggcagaaggaatagcaagagggagggccctgaggtgggaacaatcttgatatgcttgagggacagaaagaaagccatgactggagcatagggagttatctggaaaatggcaggagtaagtgtatcagtcagcaattgtcactgtaatgctgtgtaacaaaccatccaaacctcaatggcatagtagaggtagctgagtcaggactagaacccaggcatgattctcttcaaatttttctctttccatccatattcactaccttcctatgtacaatccactttctcttaaagtcacagcagcctcagaatgtattacatacataagaactagtcctacatctagatgtaatggctttcaaacctttatgagcataggaaacacctgttgagctggtttagaatatagcatttagggccttgcctccagatagtctgatttcacagaaacctgcattttaaaaaaatcaccccaaatagttatgatgaaggtgatctatgtacgacacttagagaatcagtgatggaaaattcaccaagaacagccacaggcaggccagaagaatggccctgcccctctacttttaggattaagcagaagctggccctagatctcaccagttaccagtgatcttgggcatttttagcatcatgtgcattgcttcactgtgataccatcttgctggcacagccatggaaagccatgagttaatgcatctccccatgtaacaaacctcccctaggactctggtccacacctatctctgctagattctctggcattgcaagaaattcttcagactgccccaagagattcgttccaatctaggggctccttatccccagctcagagctggatttggctcttgcttggaggcgggaagccctgctgggccagggcttagaggggctcacaagaaatcaaagcaagcattctccgcctctctcctacagccctgcatgcatcttctctgatcccttgcctgagtggggggtggcattccaaaagctcattactggcttacatactttgccttaaatcagctcttaaatgccctgggatgaacagccctaaataggaaagaaaaaaaaaaaacaagtttcttgcaagttcacagatatgcttggtgctttctgtcaggctagggtgtagccttctctgttctaaatttgattttctgagtctttaaggaaaaatggctactggtcccctggacgctgattgcttcagcatctgaatctgctccatcacttctacctccacccactggtccacgtccagtgggtagaggtaaaggggatggagatatcatttatcttcaaaggataaaactgctctgagagatctttgctttcttagaaacactgctggaaagttgtttctttagactacattaacagaagtaccatctctaggaagacaaggtggtaataactaacatcaaatgagcagttcctatgtaccctgtacatgtcttagccaacttcatccttgtaacaaacctggaaggcaggcactgttatcactcttattcccaggtgaaccagttgaggttccaagaagtcttttgtgcaaggtcatgcagagttgaggcccccaagtcggtagacttcaggagccagaccctcaaccccctcactgcctcccgcctcatgctgcactgagcagaccatacccggatggtcatgttcaggttggctatcaatgcagaccacgctgggcatattcaggggacggatactcagaactatataacataaggaatagaggaaggactggaggatgtattaacatgaagaaaaggtagactcatggcaggagatgagcagggtaaagaggtgcaagacataaaaagccaatttcatatacatgaagatttatcaagagccagaaggccctctatgggtccaagagttacaaggcctaatgaggtgaattaatgccagcatataaggaaaagcttttgaatactcagaagtgtccaaaaaggggtcaggctgccttggaaagtagtaagctctccatcagaggcttggcaacttcttattagggatggtatgagtatctcaagtacagatacagatgacccaaataaccactgaggcacttctgaccccaagtataagagattctattgtaacgcacaggagtccatctcaagcagcacactgagccatctccttgataaacctaaaggtaggtattattcctcccagatgctgtcttcttagcctgggatgcaaaagccataggatcacttcacgtccaacccccatcaggtgatctgtcatgaatcacaagttattggagccagatggaactacagagctaaaagatacatgaagacaccgaggcctgcagacagggactaactttccaaggtcacagagctaacaagtgtcagagtcaggctagacccaggactcacaagttgagctcacaattagttccacttcctacaccacctggatcatgagtgtcaagaatgaaggacctttggcagtcttctcatccagcagtgacaaacaggatgcacttcatgtgccagcttttaattcattggtcatggtttcctgaagtgctgttgtccagaaatattctgaggccatatctggatccagtggacatgagtgaatcatttatgatgtctgctttggacacaggtggggaagtgacaacctgtgtaccaagggtttggcagccttgagctaatccatcttaatgactttctgcacatgctgcctggaagtgatattaatattgcaaaagagattataatgtgtgataacgttgtagtacctcacttattaaaataattcaaggatccatctttgatggttaaacccactgtctatgtctgtttgtgttcctacaaaggagaacccaaggctgagtaatttgtaaagaagaggtttatttggctcacagttctacagactgtcaagaagcatggatccagtgtctgcatctggtgtggacctcaggctgcttccattcatggcagaaagtgaagaggagctggatgtgcagagatcacatggcaagaaaggaagcaagggagagggggagatgccaggctcttttaaacaaccagctcttgggggaactctcttaggactaatagagtgagaactcacttcttacctggacaatggcaccaaaccatttatggagaatccacccctgtgacccaaacacctcccatgaggccccacccccaacactgaggatcaaatttcaacagatgagatgaggaggatcaaatatccaaactatagcacccacctaacgaatgcaaaagatgtgcagtgaccttaagccccaacaatatagagcagatgacagttgatatgtagatagtttgaatgacagtttaaggtagcaggttggcaggtggctccaccatatacttgttgagtagtcctgagcaggtgtttctctgagatcctttggctggtctgtaaaatgagagataatgactctctcacaaggttgccatgagaaatagagaaaataccaagtactcagcatagcctaacatttagcagttgctcaataaatgataggaagtattggctttataatattgcatctacccccttctctctatgttagaacctttccaggcatttaaaaggtgagcagcaaaggccacccataaatgtgctgctagagagcacataggtcaccaatctcagactattggtctgaggcagatttttggagtctcttattcccgaagagatccagggacctgctttgcaggtgactgagaagaccaaggccaggagggaaggccaaaaagctccaagcagatcacttatctgtataacacttttcaccttccagtccttcttcatggagtttcccaaagtacacacccacagtcctacaaattggggaagagccagaggcaataaatgtgtgggagcagtcagctgagaactggatgttgaaggattgtacattttcttgaattacatgggagcaaactgcctcctgagcctgctgtacccaaatttatcaaagcacaaagcatttttaaagaccatttaataaactgattaaatgtatttgacaacggagctagaaagccagtcaattcatgtcttcatcactcctgagaagttgcctacacgataaaaatggaagttctctgaatctgtgggtgggagggctttcactctcctaatggaggagggaaaaccagggcatgctgggaggccgtcccagcccatcttcctgacatcgctgcttttcctgtactgtgctaagtgcagagaaggtccagcgccctgcctgtttttcacttgcattcttgtctccagactttctttctctccccacccttctcatgaccactagcatctaagtttatcgcttcctctctgttacctctgtatcctccaagtacatgatatacctctacagctcatctgccaatgctgcaaagtttacttatttataaccttcccagtgccttgtgtatattagatgcaggagtaagatgttgtgatcgagatcgtggtggtgatgatgatgatggggagggagaggaagaggagggggagaagattaggcaagaatgtaaaagccctcatgggtcttggaaatcacagcatctaagttctctccttcctctcccctccttcccctggtttagagatgctttagctagcctaagggcagaatagcctgcctcttcatttgttcttcaaaatccattgtttggggcacaaaatgatcttcagagtttaggctcttgaggctcaataaacttaaaatcttttctcagctttcctgttagatcacccacccccgaggcaatgaatgctgctgagctgatggaaaaagggcggtgagaaactccagaaatattttccggcagtgtttcttctttatctctgtcccccagtagctcagtgaggtaaagataatcatcagtttttaattttttatgttattattgtggctgcataacagttgtacatatttatggggttcatgtgatactttgataccagcatgtaatgtgtaatgatcacatcaggtcgttattttaacactgaggatatggatgctcagaatggacattggcctcactgaggtaatgcaggggtaaatggaggcactggatggggctggaacccccatctgtctgactcaactacctgaagatggaatatgggttgtgctaactaaattaatgagtagaggctgcctgaggcgctgccttgagaacagttctgaggctgcatctgaacttggtgagaaaagaagtgctgtgatctattagtaatgtctgccatgggcactggacctgggagcagccacgggagccatgccatgatccccagactccgtgcttcttagaaattctgattgttgtttgttcaatagataaatgaatgcagaaactgcttccttaatgtaggcttagagaaggggattggagtaggaagcaagagaggcagctcctgggcctgttcatggtgtgtcgggaggccaggctggacagtaagagataagaacggcaggggagattgagaccagaacttggaaaagcttacaatgccaaactaggaagcctgagggtcgtgaaaggtttgggctcagaggaataagtaagaaaagctgcatttaacaccaggaatctggcagggacacgtagagtcaaggagacagaaagaccagcttggagagtggttgagtctgcacgaggcgtggaggggtgcccagcccccggcagaggcaggtcacagtgacaaggacagaaagcctggagggacaactccggggacttagtggctggcagaggggactcttttccccagtgactcatatgctcctttttttctagctgaatttcagttttattttcagctccaatcagtggcaatagaggaatccgtgtgctttatttctcctgctccacattcctccccacagtctcccagaggctaacattctcccatcctccaaagagaagaaatccacagcccagagcagagcaggcctggtggcttcatgacagtcatcagtgtggccccatctactagtgctctccaagtccagcaatgtgttaaccctttacaggcattatcccatgtaacccctaacagccctaggaagtagacactactagtacctataattcacaggtaagaaaactgaggttcagaaaggcaaagtaactggttgagggtcacacagctaagaagtcgcaaagccagagtcgaaaatattcaaaaccaaaaagaaaaaaaagaaaaaaaaatctgagttgaaagcttgctctcttaacgatatagctctggcccaattaagctataaaatgtcacaggtagcagtgtccttagagaacacctaagctgagaactccctcatttttcagagggggggatctgagggtcagtgaggagatctgttttgtccagggtcatcagtgagttaggggatgagccgggacttgaaccctacagtggaagaaatgtgagccacagaacttaccatgttgcttgttgacttcctctggcacattccactgtattttccccgaagcctctccccagcctctcagccccactcctcgtggctccactccctattactcagaggtgttcagctccacccactagtctcccagcatggcagtttctgcccattacaggcctacaatacctgcgagcctgtcagccccctgcctcccacctctcaccccccgccccggaaatggttctgttgttaccggaccaatcagggcacccagcagcgtctagaacttggggctgataatggcatcgtgaatagaggaaattagagctgaatgcattcacagtgaatattcctcccagggcagacggggccattcgctgagtggcacatgacagatgttcacatggaacccagtcgcagggccaccttcactcctttcaccagcacggctgtctcccagccctggccgtgctttagagcactctgcatccccaaccctggccctccaagccctgcaggagccagtggttctgcatgtctcctctagtacctctcaagcacatggccttggccctgaagagcgtagtggttgatcgcacagcctttggggttagatgtatctgcttccaagtcccaaccttctgcctcactgctgggcaggccgggcaacatgcctgaatctcagtgcccccatctgtaaaatggggataattaatacccaccccacagtggtcatgtgaattcaatgtgattatgagtgtaaagagtttgtccccatgcctggtatacagcaggtgttcaataaacgatggctattatgatcatcgattgctctctgtcacctgtgtatcctccaaatgcatgactggcctctgcaattcatctgcctcaaagtttacttctttgtaaccttcccagtaccttgcatatattaggtgcaggattaaggtgttgtgattgagatgatggtgacgatgatgatgaagatgctgatggggatgcagaggagggggagaagattaggcaagaatgtaaaagccctcatgggtcttagaaatcacaagagggcaatttgttgcagcagaaattgaattacctttggagttatacagatgtgctgaaatttactgtcagcaacaggaaactcacacaccctgccgggtccatgccacattgttctgtgtggctggggaaagttacctcatctctctgagtctgggtctcagtccctcatcttctccagggctgttgttaggagtgaatgaagccatgctcacaaagtgcttagcacagtacttggcctagtgggtgttcgattcacagtggatattgctgttgctactcttgtcagtatatttctgatctccccaacttacagatcaccactccccttgagagcagagttgtacacttcattgtgtgtgcttctggagggcagggatggaacatccattcatttagtcaacaactgtggattgagcagtgtctctatgcctgccactgtgctcagctctgaccacacagcagtgaacagaatagatgagctctctctgtcctcatggagctcacagcccagtggggaagacagatatataggcaacaagtttttaattgcaagtaaaggtgccagccccaaaaaacaccaagtcacaggatacagaacaatgtgggatggaccgggcagggtgtatgagtttcctgttgctgctgtaacaaattatcacaaattcagtggcttaaaactaataaaaatgggccgggtgcagtggctcatgcctgtaatcccagcactttgagaggccaaggtaggcagatcacctgaggtcaggagttcaagactagcctggccaacatggtgaaaccctgtctctacaaaaatagaaaaattagccgggtgtgactgcaggcacctatagtcctagctactccaagaggctgaggtgggagaatggcttcaaaccatgaggtggaggttgcagtgagccgagattgtgccattgcactccagcctgggcaacagagcgagactctgtctcaaaaaaaaaaaaaaaaaaaaaaaaagctaatataaatgtattatcttgcagttctggaggtcagaagtccaaaatgagtcttatgggactcaaatcaaggtgttgtagtgctgtgttccttccgggggctccaggggaaagtgtttccttgcctgttacagcttctggaggccactcacattccttgtctcacggccccttcctccatgtcctaagcacatccctccaatctctgcttctgtcatcacatggccttcctctgaccctgagcctctgcctccttctgagaaagacccttgtgattacatcaggttcacctggataattcaggataatctcttcatctcaaaatccttaagttgatcacatctgcaaaatctctcttaccatgtaaggtaacatattcacagcttctggggattaggacatgcatccctagggaaccatgattcaacctagcatgggggaacccactacaggcaggtgttgtccttgccatcgccagctcagtgcttggcacagtagaggccatggatattcattcagagagagcatgcactgaggcaagcctgacctcaagatcaagacaggaaattggctttcatgggttaaggacctgttactttgctcatcaatgtatccttaatcatcagaggtcagatctgctggagagtgcaatctttcagtttccaaaagtaagactggatgccttagaacttaaagtcagggaggtacccaagaaagcaatcatagactgagtccccatgcagtgcactttctcggatggacaatttctctgttctgacagtcactgttgactccatttctcagatgagggaccgaggcacagagaggtgcagtcagtcacctgaggccacacagtcaggaagtggaaatccatggaaactcatcatcagctgcctcgcatcagggccagtgctctttatctccaccccacacattataaagccactcagctttacactcaagggaacttcctatttccctactggattatatgtataatttgtagtattgcaagatttgaacagaagcgagcagcagcttgtagttgtgtgtgtcactcactcctgcctgtggggatgccacgtgattgtttaaagggttggaatcaggagaaaggcaggctcagagcaggaccaagagagagcccacccctcgcctccccaaatccttcagcttcctgaagtgtggctgctgggtagcagctcccccagggaagaaaatataagatattcccaagggaccctggaagctttatcccaaggcttcacatgtgtaggctgtttcctgtgattcggtctggctgtcaatgatctaagattgagagccaaggtcagtgaggggggaaaagggacatgtagtgcaggggttcagcatccaggcctaggacttagactgaggctctttaccctcctctgtttcttgctgatggccttaggcaagtcgcttcccctctctgaccctcagtttttccctctgatgaaatgggtgtaataattgtgcctacctcttcagggttgctgtgggataaaatgagctcatacttacttcttttttttttttttttttttgagacagagtctcgctctgtagcccaggctggagtgcagtggcgcgatctcggctcactgcaagctccacctcctgggttcacaccattctcctgcctcagcctcccaagtagctgggactacaggtgctgccaccatacctggctaactttttttgtatttttagtagagacggggtttcaccatgttagccagtatggtctcgatctcctgacctcttgatccacccgcctcggcctcccaaagtgctgggattacaggcgtgaggcaccgcacccagccagcgagctcatactttcatgttagcattagcatagttcctgacaataagaaccaaatacgtggtatctgctattttctgttttaattaggtattcagagtctatgttaaattaattaacatatatacttatggaacacctactcagtgccaggtattgttgtagatgccaggagtacagcagggaataaaacaacatccctgtcctcgacacaaacacacaagtaaatagagaaggtcagagataaatgctgtgcaggaaaacaaagcaaagtgagggatggagagtgcggaaggttggggcacttttgtttcagatgagtgtcagggaagcccccttggaggaggcactgtaagggcacagactcgaatgaaaggagtatgtgaaggtgcttaaattgtttctgtttggtttggtgtggtgtgatgtggtgtggtgtggtgtggtgtggtgtggtgtggtgtggtgtggtgtggtgtggtgtgatgtgatgtggtgtgcggtgcggtgcggtgcggtgtggtgtggtatgggttgaggctggccttaggagcctgttggccttccaggccagtcctgaagcccagcccagagcaccagactctgcagtcagtcagtggagggcccacatctcagccaatgcatggctttgggtggtgacttcatctcccctagtgttcctttccccctctgcaaaatgggaatggggatggctcagaactcccagcgggagttaggaggaataatgtataggaagtatgagcagagtgcctggcctggagcatagcgcatggccgatcataggtaagtgctggtgttgattttattggacacaagtttggaaactcagagcctgcagggatggccttgaaggtaaagaagaggtagttgggagttttacacttcccaggacctaccctcagagagacaggggtcattccagagtatctggatacccagtttgggccaaagatacttccagccagggcactcgtcaaccaccttgatatttgcccaacacagctcctctgaggagagcttgaggtctgggggccccatgctgctgattaaactgatggctgggaggcaggtaaagcaagagtggagaagtgagtctggaggtggaaatgagatctccaaggaggggatggctgactgaggctgacacgtttctatccaaccggtagaggatttgcagttggactctgctttatggcttggtgatggtcagtgttggggcaggcactaggtcagagggtgatgggaggggtgagggaggttccagtctcacgctaggctgcctgcaccttcagcctcagctacctcaccacctaactggggaggattaactataactctgaccattcctgggactgtctccatttcaaacaatcagatcccctgccagactgtattagtcagagcagtgcaaatgctgtaacaaacagccccaagtgtctgtggctgaaaccatgacagtttacttctcgttgccatggcagccagtgcagctcagagtggatgggcatgtctgcatctgcatgcatgcaggctccttccatcctgaagctccccatcctcgcccttacactgctggctgggaaagggagcctggaggaagcctcaggtttgtatggggcaggcctggaagtgaggtgcaccacctccactcctatcccctgggccagaacttgggcatctgaccacacagacttcccttggaaggagaagagaacaaggacactgtgcacctttgtcaagccaaccaccatgcccatggagcatctactatgtgcagagatgtcagctcctccagacaatgttctctgtcattttccatctgttcaagctgagtcagaggtgtgtacatgtgcaaatgcgaacaatccaggctcacttcctgcttccctgagtcctaggctaacctctagcacagcacagatcacaagagtgatgactgcctgaccgtgtgtccttcctcccagtagagtttgagccacatggaggcaggggccacagcctgtattctcaggacttggacagcggtggaagctctacttagcttgctgaagaggaaaggggaaagaaaggagagtgaattggcacttgtcgagatctcccagttcgttttttaaaaattgtggtaaaatatatgtaacagaaaatttaccatcttaaccattttggagtgcgcagttcagtaccaccaagtaccttcacgttgttggacaaacttcaccaccatctgtctctagaatgttcttcatcttgcaaaaccaaaactctgtacccattaaacgactccccattccctcttcccccagctcctagcaactaccattctattttctatctctacaaatttgactactctaggtacctcgtataattggaatcaacagtatttgtaccctggcttatttcatttagcataatgtcctcagactttattcatgttgttgcatgtgtcagaatttccttcctttgtaaagctgaataatttttcattataagtatataccacactttgtttatccattcacttgtcgatggaaatttgggttgcatccacctttttttgctattgtgcataatgctgctatacacatggctgtgcaaatatctaatattagtccctgctttcagttcttttggatatgtatccagaagcagaattcttggatcatatggtaatcctatttttaattcttttaggaactgccatattgttttccacagcagctgcagcattttacattcctaccagcagtgcacaagagttccaatttctccatatcctcaccaacacttgttattttctgttgctgctgtttgtttttttattaatagtcatcctaatgggtgtgaagttgtttctcattgtggtttgctttgcaggttttgatttgtagattttcctgatgattagtgatgggtgcatcttttcatgttcttactgaccttttatatatctttcttggagaaatgtctgttaactctactcatacttttgtaaatagtattcccaatccttctaactccccaatgaggtggatattagtatgttcgtgttacagtaaagccaactaaaccttagaaagactaggttaattatccaaggtcacacagctagaaaatgacacagcttgtattgaaacatcagtttttctctttccaaacctaacgcacatttcatgaaacctacattattgcaccataacatcatgttgatttacttatctgctctcctgcctgtcccatctactacataaattgagtgtggtttgaaatcagagactacttctcatctttggcacagtggcagccatggatcagaatctcttacatgctggataagtggatgcaagctcaaggccacacctaaagtccccaggtgacttgatcacttgagttagctgctggaaacctgggcttcctcttctgcaaaatggggagagaaaataaattctcagtggattgtttagaagatttgagcaaagacctctgcaaagtgctaagcatgtggctagcatgtggcaggtgctgcctaaatagtagaaattaacactgccatgcttataagctccggacaaacacaagaagcccgaaacataatctgtgccttctgcttgcattcctcctagttggggatgtaaaatagcccagctacaatcaaagaagaaaatcaaagtcagcacagactatggatatgcttctatatgtgtagattatttccagactcattcggaagaatctggacatactggttgcctcagaggtcaagaaaattggctcatttacttctgtaacttaatttcgactctctatgcttttacatagttggaatttgccatgcacatatactacatttaaaagagcgtgtacgcgagaataatgtggtcaggtggcctgatccacaggtgggtgggagagacaacagagacagtcttctgaccccatctggcttctacctgccaaccccatgtattctggagactctccacacctcctggcatgaagcagaatccctctcagggggtcacctcacctccttccagaaatgtttaacagaaagaacctaccattggctttctccatccccagcacctaatagagatatcacggagaggggagcatttgtaatttactttggaggggtgtgtggaggccgagtaacaccgccttccatctcagtgacaacaaactcattcttcactataattaaaatgtcactttgataaataattccatcagcccccttccacctatgaatagcttcttgctataattgttcacattctgctgaattagaagtattcaagggagaatttaagaggtatttaggcaacaaagataaatcgggtgtgttttccaccctcccacaatccctcattaagcgagacatcatccccggctgggcagggcggggctggggggcctcatccctgtgttctcagtcactctctccctgagtggagggagccggaggggttgccacagcagcgtggacctcaggaaggggctggagtttggggatacatgtttgggggccttcccttcccagctattactgtagaaaaagaagaggatgcctgaggtggtgggaagaacgtaggctctagcttcaggtgagcttggaaaagtcagtgaacatttatggacctctgttgtataacagaatacaagatataattcttcattcaatcttgtgtcaagagcttgagtcaagatataattcttggaagagacatctgacattgagggtcccccctcccatgttatgggactcaagtcttccaaaggatgactttccctaggagacacagctagagattggcaaccccaggacctttgaatattcaacaatacccagtagggtatgaagcaccgtaggagttccgtgactattcccatcttccctcatttttgttggtacctcttccttcctgataaatcacatctgctgggaataatccaataataggatgcacagagccagccacagtgtgttggacacctcaggaagtgtcccatcttgggtatgtctgtcctcaccttgggtagaaagagatggtatttgactctttccccaccagaagaggggtatggccatgtggttacaagagcagcacttcatagtatgaaagccagggttccaagacaactactcccagtgtggggctggcatgttagtgactctaactacagtttctttttttttattattgtttgagacagagtctcgctctgccacccaggctggagtgcagtggcacagtctcggctcactgcaacatccgcctcccaggttcaagcaattctcctgcctcagcctcctgagtagctgggattacagctgcccaccaccacacccaactagtttttgtatttttagtagagatgggttttcaccatgttggccaggctgctcttgatctcctgacctcaggtgatccaccccactctgcctcccaaagtgctgggattacaggcatgagccactgcacccagcctaactacagtttctttatctgtaaattggaaataacaatagtcccactgatgagttatggaaagtagggccttccacggtgtctgcatgtggcaaacattacccatagctcctgttgggtttctcgtgaggagtgtaacagtttggccatgcagttttaaatgccacatgagcggctaggtgggagggagtaccgggccaatccaactcagtcaacacaggtcccccacaccatttcctctgtggcaggtataagagtcaaggcccacttcaaggccaccaaagtccaagcatctccccagtcctagcttccccagagagtcctgaatgacaggtattcattggttgtgatggggcttgtctggggttggggactgggggtgaggagtggggtggggtttaaaaatggagggcagcggtaccagtgaaggggaagcagtgataaaacccatttgagtttctgctctgaagcagagtccattaggatgacggctccttggaccagggagctgcgtctgaggggctgtgcccagttccatcagtggtgggattgggagtggtccatgaaaataactcacatgcatgtgtggctggctgaagaagcagagaagcctgcatgggcagccaatccccatgctgagcgctttgcttggaatggctctgataaagaagcccatgatgctggaaggaagggctccctgcaggaccctctgggatgattccctgcccatctccaggaccaccctccagaatatggtctaggatggccttgagtgcgtaggtttcagaatgtgggaagaaggggcaaggagaaaaaaacaagcacctattgatcacctgtgttagctcattcaatctttctaacatctctgcaggttaaatattctatcccattttacagagggcaagctaaaactgagagatctaagatgattttgccaaggttacactgctagcaaatggttagatttgaacccaagactctaactccaaagagccaagctctttacagtggatcagtccatcatctctttacattttacaagtttgtgtcatggttttagacaatatgtttgacatgcaagacgctctgctaaccttaatgaaggtgtgcatgtgagatgcatgtgggagtcagtgtctcgggtggtgagcttcatccagactcatttcaaactagcttgcacagcagagcttccagcaatgcaaatgccaggttactcgaggctccctctaagatgcagggactcaaaaagttgtttctgaagctccagggcctttataacggggcttcgaaagcagcagaaagaaacagcacacaaagtgtttgtttattctcttgtattcaagaaagagccaataattcaaacaactaattctagaagaatagaattcccccagtccccaccttaatacaggcaggctcacctgtccattggtaagtcagcacatttctctgtgaacactgatgccctgtgcccatcacacccatagtatcaactgtcaggacagctgccagatgaaagtgctgtcatcatgggcagctgcctcttggaccaggagctaagggagaaactccttccttagagacccacgccagactgcagtgttgtttgagagacctgagtctctcagggatgtgttctggagatctgcgagcaggactgtatccatgaatcaggactctgtcttaagccacagtagggaagaggaatggcacaatagaggaaacaccaccccacgtagcatggagccatggagagagcatgagtttagaagccaggagcgccagctctgccagctactggccaaaccactgggggccagtgcctcggccatctgtgaacagacactgctggataatgatctcaaagctctcatcctgtctaacaccatccagtttgagacctgcttaatcagtggggttctgggaggccagagctggagctatgatcagggctaaaatgcatacagaaagcacagatgctagaagccaaatggaggttgtccagggggtccccaaccatgggactggaagcagatgtcaaaatcaaggatcagagcttctgggaagcagacacagcaagggaacatgagtagtgtgagctcacgctgagtgagcactggctgtgcaccagtattgaataggtattaactcccttcagctgcacaattatgctgtaggtgagttttaccttgggaaaccaaggcacagaatttaagtaacatattgaagctcatgcagctgctaacagggaaggccagggtctgaacccagctgatccggctccagcatccgagctctgaaccactggtctatcctgcctctgttaggacttggtccaatgtcatcatcctagaaggaacatttaggcccgcacggtgggtggctggttcaatccagtttaaaggccaggagcaggacagtgacttgcagctgcagcaatcctatgactcaaaccaaagcagctgtgacaaataaagggactgactctcattctcccgtgctagggaaggatgagctatcaggccttgttgcaggctgagtcagtcatcccacaaaccacctaagtgaaacctcttcactgagccttatttcctgagcgctctccctttatctgtgcttgcaaagaggcgtctccctccatgccagccaacccacccacccccgcacacacataccacctctggctggaactgacgaccatgggttttagaaatgagataaatctgggagatgaatgtattcatgagcccataaaggggtcatgaatcactggccccaattactgccttcaatcctgacaggatgaattccctcaagcagattctccttgtcagacaacacgggaggcagtgtcatggctgatctagagccacagataacatcattattccataccaggctggtttcggtttcccaagccacctccacttgatttacagctcacttctgatgctggagagagagataaatatatatatatatatatatatatatatatatatatatatatatatgaaagaaagaaagaaaagagagagagagaaagacacaaaggggaagctttcatgccaagtggaaacaagacaaaataaatgcaccgaatccgatttcaaaagctgtttgaaaactctgtccggaattgctggaaagggccccagcatccacaggaaatgtatccctgccaagccctgtgctactgaactctgtggcccccactcctgcctcccggtgacttgtttagaactacttcagatcggaacaaatcacagccaactgcagtcgctgtctctagcccttcaatcactcctaatcagaccgtgtattttagcaacagaatcttccctggctgaggagctcattcatctgccttccaccagctcgacaccctttgaatgggagatgaggggaagccacctgcttctctggcagccaagggaagctgggaggaggcaggaattgccagccctccctctctgatagatcaccagtgggagtccagaccagcaggaaccaggaaaggaggtggcaggtcagagagaaggcactgaaaagggtcatctgagtccatgtttggtgaatgcccaccttgagctggacacctggctgtggtccctggagttggatagcctgggttcaaattctttaactaccattttctggccaacccattctctgtgtgccccggacaaggtacctaccctgtgagtatagaagcaaacccccagaaaaaagcaagtggaaaaagcaaagaaccaggacatgggtggactcgagtcctagagaggctcaggaaacttttatccaaagacacagaggagctggttgcagaggagagcttaaactcacacagagaggggaggcctgggaggtgtcaacaagttatcttctcacttcagaagggccctctcgagaacagggatttcccctgctctgcaagggaccagtggacagaagtcagcagaggccatgtaggggcaggagcttcctgtcatcatagatgccaaagctgaagcaggatactgaatgcaaacaggccctgaggccatctgatgtgctcgttcccatagccccgctgtgtgtgtgtgcgcgtgtgtgtgtgtgtgtgtgtgtgtgtgtgtgtgtgtgtttggtggggtgggaggggaggcagaagaggaagagagggcagagagccaaagactgaggccccggcccataagtaaggcagtttgcagatctcaatatcctgtgcagacccacaggctgccgtggggttgagggctgctggtgtcttaaccagaggcagagactggaaggagcaccagatagaactgactcactcctccttcctctaccacatttcttctctgaaaatttgccattaatcacaggtgacgatggaatcagcaattaacatgagctaaaacaaactactaggcatacagtagcgctcaataagtgctagctattatgattacaatggagggaaaagttgtcaccgcagcacaccgtgcatccctttttggtctggggcctctcatccagacacaggtaagaagactcctcactccccgaggaatcgcgtgcaatgtcatgatggcatctgatttagttttcccacatctcaaatgagatcagggcaactagtcttactcaacccttcagacttacataccctgtgtatcaaggaatgagtctcccatcattggagacaatcaagtagagcctttctggtggaggagaaggaagtagacaagtggagctcagaggtgccctcccaccccgagattccatgatgctcaggactgtggaatgagcacgggagtgtgatggacctaggggtggggaagagcgagaagttcccgtgcaatggacctaggggtggggaagagcgagaagtcagaacactggcagaagaggaagaaaccagacaacctggaagccaagcagatgagtttcacctgcatatcctctcctcttcccccttcctccagcgttgacttatgggaggtatttcagtgaggacaaaagaggacttagtcaaacaagcacttattgaaagaaaatatattctacacagcacttccgtccttttaaagtgattcactccctttccactgcctattctgtttaggagaaaagtggagcttcttagcttggtgcccaaggtcctcatcaatcctaagatgacatttattgagagcacatgatgtgccaggcattgttacaggcaccagctcattcaagccatataaagacaaccctgtggtgtaggttctctcagggtcaccccttcagatgaagaaactgaagcccagaaaggtcaattaacttgctcagggccacacagctagttagtagtagagctgggacctgaactcaggtaactggtccttacgctactgttcttaatcccgtacttaagtcgaccagccctgccctgccttggctccagcctcaccttaagtttctcaccacctggagtttttggccaatgccacacggaatgaccagcatttctctgaacacatcatgctgtatttagcgtccaggctttagcacagctgttccctgtgcctggaattctcttccttttttgtttttttctcacccaaaaccagcttgtcctttaagatccagcttaatgttctcctactcttgggagccttttttggtgcccccaaccccatcaggccacgtagcacctggtagcaccaggtagcaccccatcctctgtgtgcccacgcctacctcctctctacctcacccaccctggacagaccctcacaccacacttctcacattacattgaaactgatgactgccttgtcatcttctccctggagcatgtcattcatggctgtctcctaagggcctagcttggtccctgcattcagtaggcaggtactatttgcaggggcaggacagcaaatggttagagcttaagctctgcatccaaaagggcctggattcagatctccactcagccatgtgttagctgtgcgaccctgggcaagctagcccgctgctcctcacactccacggtcgctgtgaggtgtaatgagatcgcacatataaattgattagtgcagggtctggaatgcagcaagcagatggccaatgaatgtttggcaacactgcacttcagaatcgggctctacctagacagacttcatatcaaattccagctctcccacttaccagctgtgtgaccttgaacaagtcacttagcctctctgagtttaattcctcctctataaaatgggcttcatatttttaaaatggcaaagattctaaagattacaaacacaacacctgcgtcgcttccctctgtgtacagagcagcgttgttgcagtttgcgcgctaaggctgtagactgggctgcagtgccttttaaatacaccagctcctggtttggagctaatgggacacatgccggggacggctgggagtcacagcggtgtagaggagaatatggcttcaagaaaatgacatttggaagtaattatgggagcaatggatcggaaccacagtcagctgccagctatccccagagacatcacaggagaaggaggcagaagctggaacatcatccgggagctggactagaacgtcccgggaaacttcagcctggcttctgctttgtcccgaaaacccagggctccagctccagggctctgtcttagaatgaggcagtttatctgttcagggcttctcttagtttttaatcccaataggacacatgttgtattaaaaagccatgcgagacggaagaaggaaattgaatgaaatttgagggcaggtaggagcagagacaataaataattcagcagtgaaggaagcagaaaaaagattgcactcatttcgcccttcaacaattatactaaacacctgctctgggccacagaagggccagatcccattcctgtgctcaggaagcccacaggccggcagggagaggctggttggaatgtgtgctttgcactgtaacggaggcatcgagcatggtaagggactggcggtggctgctgcctgcggacgtcgagcaggggcctttgaagaggcaggacctgtctggagtcttacctgggccttggccctggcaatggggaatggagcaggcagcaggggacagatgctgccagaaaccgagatggtgccggaggactgggctgagtctgggtcaaatgacaccgccccaggctctctgccctctggggtgaggcaggaggctgcctctgtgtgtgattcagagaccctagaatcccagtggccatcaccccacagcacatgccaacctttctgtgataactttctcttgtggaactgtgaaagtgtaagaccagctcctgtatagtgcatggccatcctttgctttggggacagtaagtcagtcaacacatacttataaatggggtcctgggccgtggcactgatctggtcctcccaccttgcctcacactgcccttcccactcaccacttccctcctctgcatcttagccgcaagggactttcagaccaagcagacctggaatcaaatcccaccgctgggcctcaatgccagtggagacaggaacagctgatccctggagccctcaggaggaagaggacgggatgcctggcttggctgctggtctggggcaggtgcccagttacagcagttggaaaaatcctcagtgttggaaggaaatttggaagtgagcatctacctgcctgccgtgcagtttgtgacttttaagatggttgacagaacattcccaaaggaccacagcggtgaccactgttctcgtttccctttggtggctcactcactcagtgctggacacagtggtcctgacaagacagtgctgtggcttccatgaacctaggacagggatagactcaaggactaagaacaaaccaggaagaagcatcaccacaggctccttgccagtcacctcatctcaccctcctggccctggcggatgggtctccatatttacaggggccagatgaaaaaaccagaggagccaggaaaaggagcttccccttcccaagggcgcaaggtgaggtgccagtcatgagatgcaagccctgagctttctgattccactgcatgtggtcccaaggttcggcgccgcatcacacagttagtgagcacactctcctcccctggccccgagtgagccagctggatggcagatcagaaagagaagtcccgggtgcccccaacatggctagctccttccaggaccaggggctaggccccagctaaggctggtgcacacagcagggcagggggcgaaggagtgggatcccacccagggatcccacccaccccaaacctgctttcggacatctttccaatgcataatgtgcagatgaggccctttgataaggaccaaatccctttccgttgcttggcaacctggctcacaagtcatagcagggaagtaatttacaggaattcaaagtgtcgctggaggttctgctgagctgaattgctgcaaagaggaacctcaatggtccaaatcacacctctggcggggaggaggggctgaaggaaaagcttccacttccgtcacttgagagtacagagccctgagctcagactcagcgatcgttttccattaacggatttactggttccatgttgagctcctgctgtgtggcaggccctgtgctgggagccagggacacagtgacaaacgagacagatgccaaccccggatgcacagagctcaaagagacagaggagtaaacagggctacacatgtgacaagataggctgtgcacaggggtctgagcaggacccttggggcaggaggaggcagtggagggatgggagggtagggacgcagtggtgaccagctagccagatagagaacagagggtgtcccagcacagggccacacaagcaaaggcagaggtggggagagaagagcctgccacactctcagatcaccatgtggttgggccagggccccagctgaggctgaggacacatggagcccagatccggcagggccttgaatgccaagtcagaaagcatctgaaatttagtctacagatgatgtgggttattgacagccaggacagggaatgacatttgtgtttcaggaaaaccactgtcttcactgttagggggtagattcagggagaaacaggaggtggaggggaagaaactgtgagtaaaggagtctctggggtacaggtgaagtttctgtgaaactggagaagaaaactgttgaggcaagagttgacaaaacttgaagtaggatggagaggaagggacaagttcccctggcatggtgacggcccggtggtgggaaccagggaagaggaggggctttgcaggtgtctgacttgcccaacaggtggcgccatttaccaagatgggaagggccggggagaagggagggttccattctagggaaatctcaggtcctcgctattaggattctttcggttgccagtgactgaaacccagctgaaatggacttgggaacatactggttcatgacatctggtggaggtgaggtcagggtgcactggagccctggcagcccactctgatgccagagcccatggggacagcggtgtatgttggacacagtagtccttcaagggcggggatcggaggaacagaagaaaggaacagcagatgccccactgaggctgagcagaacatttaggatccttggccccatctcattgtgccctttgctgtggctcatctcacacttgcagggagaagccaatggatctctgtgaatggcgaggctttgtatgcataaatgtgggccattttgtccccaagaatccctgggggtgaggaagccacagaaaattgaggtcctattccctgctcactcctggtatgtagtggaagctggagagcctttgtccaggcactgacagcaggaggtttcatgcagagctgctcagggcatttcccagatctgtcccacccctgggaactggctcagtggccttgccccaccagaagactgggaactgcacccaagacaggttcagcccccccaggagaggacctgctggtgtgcgtgtccacacacagcacagaagcaaggaagatctggcaaacaaccttcaacaaaaaagaggccatttgcactggccacctgtgctgcttctttcctgagcagacttggttctgagccagggggtctccctctttccctcctccagctcaggaaaggactcaggcacatgtccacccaacctgcaggagagtgtggcacagcagtgaaaggcctgggcttcgcaggccaacttgggtttgatttttggctctgtgtcacaggcctcatgagatgtgctcacctcttagctccctcatttcagaatggggatgagaatctgccatgcccctgcccaccagccacctgcccaccctcccttatcatgtgccccgacctcccatgggtgctgctcatctgagtccctctgtcctcactatgacggctggtctgggaacccctctggccctactctgcttcaagaccatttagcctctgctcctgcttccttattttcttgctatttcccagctgcaatttctttgcaagacagggaaaggattggatatactcagcccatcttaatttttttactgtgggaaaatacacataacataaaatgtactattttaaccattttaaaggatgcaattcagtggcattaattacattcacaacggcatgcagccatcaccactatctggttccagaactttctcatcacctcagatggaagccccgtattcactaagaagccactccccattcccacctcccccaactcctggcaaccaccaatctgctttctgtttctgtggatttgcctattctggatatttcatttaaaggcatcgtgcaatatgtggccttttgtgcctggcttctttctctcagcaccatgttttagggtctatctacgttgtagcatgggtcagtacttcaaccctgttcttttttttttttttttttttttgagatggagtatccctctgttgctcaggctgaagtgcagtggcacgacctcagctccctgtaacctctgccccctgggttcaagtcattctcctgcctcagcctcccatgtagctgggattacaggcacgtaccaccacacctggctaagttttgtatttttagtagcgacggggttttgccatgttggccaggctggttttgaactcctgacctcaggtgatctgcccacctcggcctctcaaagtggtgggattacaggcgtgagccaccacgcctggccacttcatccctttttatggctgagtaacattccattgtgtggatataccacacggttttgtttattcatcagttgatgaacctttggattgtctcacattttgaccattgtgaatcatgctgctataaatattcatgtacaagtttttatttgaacacttgtctctaattctttggggtatatacccaggagtggaatcgttggctcatatggtaactctgtgtttaacttattgagaaactgcccaacagttttccataacagctgcaccattgtacgatccctcaagcaaggtgcaagggtatcagtttccccacatcctcatcaatgttcttgtttttatggtccttccagtgggtgtgaggctctttttactttttaatcaccaggcagagatctctcaaccaactataaaatgattaaatgactgatagcctttgtgatcaatcagactggctggagaacaggaagatgagaggagcctggagtccctgacccagaaggtggccatctcaaatgttttttccatcttccagggctgtggactgggcagtttgggacccgggaggggcaggccgtgagacctgtctagtgcacatgtgcgacctcatccgatcctcatagtaacacttactaaaattcttaaccattaccccaccagtctatgtccacacggccacgctcacagccgtccctgcagtgtcccaggcccactctcacttgttctttgcagaacctcatgatgaatgcagcatccactgtttccttcttctgctgctctggttcccctccaccgaagcactactttgtccaagaaactgctccttcccaccaggcagcgccctaggctggggccaaactagccagtatcaaccacaggcttctgtcccctggcctgagatcagattcttagctgcacagctgcccctgagagttcctttccccaggatgtgttctcaagcgggcaatgcctcaagcctcctgttgaggctagaggaaggaccacctcctgttcaccagcatgcacagactagacaggacggctccgtctgtcgcgcttctgttggtctctcatgcccaagggtgtggctctgggatcagcctgccctggttcggatctacttaattgtcactgtcactttcagctcgttatttagcctccagtgcttccattttctcaggggtgtagtgggatgatgaaaacaattcccgtttcgtagagtagtgatgaagagtaaatgagctaatcccagtaaaaagctttaactcctgagccacagtaagtgctcagtttatctaagcatcattatcaaacataaacaatcatttacagagtgatgaccaccgtatgctccaaacccagggctgggggcctttcctacttctacagtgacccttagaggtgagcagtctagcccccactttagggataatgtgacgaggtgctgagaggtcatgatctcccagcagtgagtgacagagcctgaggtgaaccccaaatctgtctgactctaaagttcatgctcattccaatcatggcaaagaaaatgcagtgtcttctcacgaagggttcatccctgcctcctcagtggctgtttcaaggagggccctttggtttgcccagatagactattcacactgaaagtgacaatggagaaactggccaggacactccaaggtcacagagaggtttgtggaggtgagatgagggtctcagccggcggggagggattccggagggcagcgatccctaaggtggagccttccagccacaggatgtgtgacgagaaagttttccctcttctcccctcacagcccgcaacaaaatctacatggcttgccaatattcttggagaatgaatttggggggctgtatttgtttcccatgactgctacaacaaattaccacaaactgagtgggtttaaaacaatagacatttattctctcactgccctgaaggctagaaggtccagatcaaggagtgaggacagaagaaggtaggcactagaacttgacccagaagcctgtgacacacacacaccccacatccttctccagccccccattatctgtctcctaggaacaaggacaccactacattcattccagaaaagaccccttttgtctgccagccatcctcagagccgaaaagcaaacctttgctgctgagagctgctgatagaagagcaggaagcacagttaaaggggaacaggctcccaactctggggcagcagatcttttgggcttcatgtcatagtattgtaaagacaattgccaaagtcagacaagatcagttgtgtgatcttggcaattcactttgtttctctgagcctcagtttactcacccataaaatggggagaaccacgtctacctgactgactcgtgatgaagatgaaattaacacaaagacaaggctgggcgcagtggctcacgccagtaatcccagcactttgggaggccgaggcatgtggatcatctgaggtcaggagtttgagaccagcctggccaacatggtaaaaccccgtctctactaaaaatacaaaaattggccaggtgtggtgatgggcaccagtaatcccagcgactcgggaggctgaggtaggagaatcgcttgaacccgggaggcagaggttgcagtgagctgagatgcactccagcctgggcgacagggtgaaactgtctcaaaaaaaaaaaaaaattaatgcaaagacaaaattagtgtgggaaaaccctttgctcagagaaatgatggccacaaagtcatattactccccccttactctgtaaaatctcctttgctagaggaagagttaaaagtccaagtgggaagcacagtcccgggcggaggcagggaaggctatcctggctctgagtcgggctctgtctacctggattttgtgcctccacgttccctttcatcactctccaacagggagatgtctgtctcccctcagtgtgatagtaatataatggggcctcctggtgctcctcagaatcacgtgctctgggcaggaaaaaggtgcaattctcctgcagaatgtacacagcaaagactggaaacgagaaaactgtcttccccagggtggcttcctaacaaatataatgagaaggcgcttcctctcttcctttcagtcacatggggaggtcaacagagagcaatgactgtcctgaggctatttatttattttttgcctgataataattataataatcacttgcatttattgagttgtctgtgtcaggcaccgggctaggcacttcactgcatgagttatcgcaagcaatctttccaaagggattaggaagcaggagttattttacagatgaggaaactcatgcatagagaggttgagtgtgacgctcatgttagcctaacatgaggatccaagagcttatccatttactcagactttttgattattttttgtgcaatttcacagacttttggtgatgcataaaatttttttagagtactagtttgggcctggcatggcagctcactcctgtaatctcagcactttgggaggctaaagcagcagaatcacttgaggccaggagttcaagaccagcctgggcaacatagcgagacctcactaaaaataaaacaaaaaataaaaataatacaaaaaattagccaagcatggtggcacactcctgtagtcccaactacttgggagactgaggcaggaagatgtcttaagcccagaaattcgaggttgcagtgagctataatcacaccactgcactccagcctggatgacagaacaagatcctgtctctaaaaacaaacaaacaaataaacaaatactactttgctcattcatttaagtcagtaaattgtgacaaatggaaaaatgcaagaaaaaaaaggaagctggacataaagctagaatggaaaatgcatgagctcttgctggggtgggtcctaatttggcttttagcttcctagcagcccttgcaaagaagaaaacaagatctgttaggtaaatctctatagcagtggttcccaagacatggtctcctgaccagcagtatcagcactacctgggaacctgttagattgtccctctccaccctcgaatctgggagtcaggcccaggcatctggtttaacgagccccctaggtgatgatgatacatgctgaggagtacgaaccacttatgttagaataaatacacaccagcttctaacattgatatcgcagagaaatttctgcatgacacagtgagctattatattgaccaaatccccattataaacaccatcatgtacttaataggcctttttcttaacttcctacttagcatacactcatgaaaccttctcaaggcacagcttaatgaaattagttccagaggcaccaagctatgtcacccagacacacagcatgatgggctggtttcatgctcatgcacacttctgagtagtgaaagcctggagaatatcccagcattgctgttagaagccaggactctggagccaggctgacccaaatttgaatcttaggtgcacctttcattaactgagtgaccttggccaattcccttaattccctccctctgcctcagtttcttcatgtataagaggaaaatgactattttatgtattccatggagttgctgtaaaaattcaatgggctaacagaccgtatgcttagtatggtgcttagtatgctaatgagtccttataaatgttcccacgattatgaactgctagagtgtgtttcctgtaggtaaacctccaagccatcaaacctatgtccatgtctcctgccaccatctgtcctggatgattattgttcagatgcatattccaaacttactgagtacctagtatgtgcggggttctttcacttatatcatttgcctttaaacagctctgcactgtagttattattacccattttctgcatcaggaaactgagttccccccaaaatgaactgacttttcaaaagtcacacaggtattaagtgccaaagccaggatttgattccaggccttctggcttgacagtggcactcaaattcatcaagtgtttcttgaggatcttgcagatattttctcatattgcaattctagtctctgattttttagccccagctgggcaggaaggaagcaggtgcatcagtttttagaactagagcaggacagatgcttagaatgtatctggttcaagcccctagtttatagctgtgagagtccaggctacaagagggacttggcttgccctggacccaaagagctaagcagaacaaatactcacatttggtgctgctcatttctctcccctgggccccacagcatcttcgaaaggtgaggtcaattcccatgaaaagtaccacactacgaagtgcagccaaggtccagaggggtatggcagagagcttagggttaattgattagagcaggaaaaggtcagaagatgtggaatcatccacatagcccttgcaaggaggtatcacatacatccactcagggtcgaagacacagacagcatgtgtctctctagccttccctctctcctggagtccatagccttggctgcctgccaggaacccggcacacccacctcccaacacctcccaagcccactccaccttcctcaaagggtaacctcttcctgacctaatcgttttcagaggaaagagcaggaactttggagtcaggcctggtttcctaatcatcatattggtcaaagcaagtcacacagccaagcccacaggcagtggggctgggaaggacagagagagaagggagaatcgctactgaatgacagtctaccacacctattgtgcaaagtgctggaagggaggatttgttcattcattctgttaatatatattaactgaacacgagccaggcactggcctaggtgctgaatatgcagcagtgaatgaaatagacagaagtacttttcctcctggagttcatgttcaagtgaataatggccccacacctcgattaatccacaagcacttaactgtctaccctgtcaggtttccatatgtgccagacacatcatgtccacaagagattctctgcaaccagcgagctcatggcccacggggaaaccagacagacagacacccaatgacaacattgaaggcttgcacgcacgaggggccagaaaacaccccacatggagtgggtcccactctaggccactctcccatcccttcccttttccaaatttcctccctagccacatgccttggtttccagggccagccagctgtgcaaaatgcctagcaagctctcagcaggcccctgctgggcacagcacagagaaattaagtgcaattagcgtaactaagccatcaccagtaagaggcacttgctctcctggcggctccctttcggagactaatggggatgactagagaggaggatccagagcctatggctgaaacctcatcaacagcttgggagagtgacagccagccagtcttctgcccgcaggctgaagaggcagtgcttcccagggtgagccagaggtcaggaatcagaaggcctccccagagctcgctcccattttcctgagtctaggaagatggagtaaattggtttaatggagtggagtcccgttgtcatggtggcaggaggagaacagacggatcgccctgctccagcctgacaatgtgaggctgggcttttagcaaatgtggccggctgtaattcagagaactcaatttgacccatgctgtatcttctttcagataatggccgtgtgtcctgcccttcccccaagtggggcaggctagaaacctctagtggactcctcaccccctcccaagacccagtcaatctatagggcccgctggttccttcccccaggtctctcctctctccctggattgtggcaatagcctcctgaaggttcctctgcgccccagggctaagtcctggtcccatccgctcttcacatacacacacccagcatagcacatttttctagaactcacacctgaacgtgcctctcctctgttgaagacatccccagaagctgatccctttgttcccaatgcccttccaccctgtctccacctggcatatgcctgtgtttccctgaaattccagcttaaatctctctccatgtttggccttctctgcctcttgctggattcctcatctcgcctcccaccggttttgcatggatccctgccactacctgtgtgtgtccatcgctccatccattgagcctgtgaggggaaagcctatttaattcattgtcacatcccttccctggagacagagtaaaatagctaataattagacaaaacattaattgagtgcttattttatgtcaagtgtgatttgaggactttatatgcactaatttatttagcttcccaaaactccattaataggtactattaatgccccctacttgaaagattaagcaacagaggcatgaaaataataaagtgatatgtccaaaactacacagctaataagtgagagagccaagatttgaacctgaaggagatgggagggagagaaatagttggggagaccacagggaaaggaggaagaagagaagggaagaaaaggaggcggggagggccgggagctggaaatgtacctttgtattttaagtcattgagatttgggggttgttactgtcacagatcctagcctgttcttactaataaaataaataactaaatttataaagaagtgtcagaaaaaaaggtcatattagaccacgaaggatgacaaagagcttcttaaaaagggaactcaaggcccaaacatgggtattgttgtgtcatgtgaatccttcacaggggccacttggtgtctgtgtggctggctctttgtggccctggagagggaacaagcatgaatgcatcagtggcttccagcctgaacagaataagttcaacaagagatggccccagctccggtgtctactggggaggtgatgaagtgaagtgttcaattcctgcatagccaccaacaagtccctggaaacacaattgttgaggatgtgtccctcggggaggcatggttcatctggctgtgtcacaaagcagatgggaacagctggcgaggaaggactgcctgtcctgggaattgccctaatcatcttcctaaatattgccgcagccaggaggaaagcctgattccctgcagatggggccattgacaggatgctactggtccgggttgggagaaaaggaatgctgtaaacacagtcagcccattcggcaggcagtggaagctgtctgaggcttcagggccccctcctcactaggggctataattcatgcagtttcttatctgccagatggccaggaggacacatgcattccagtggtgccatcttctaagtgttggcagcttgccagtgatctcaacttcattttcatcattgccttttgagactttttgttcttaatcaccccaaccaaccatgaaattttaataccagaaatatattctctgtttacatactttatgcaaaatctgttttttaaacgtaaaaaggggattttttcacacgtgcattcccacaagaaccaattctctcccccgttgagaatgcctgttgtacactaaaccttcagataaccattttctgcaatcagccctatcagatttggagggagagaagcaactcaccaggaaacaaatgctctttgcattgttttgtctcttcccagaagcctcccatccaccttcagctggagttgagctttctaacatcactgcattcctgcacatccacattaccatctttatgtatttgattcctccttgagggcaaggcctgtttctctgttgtttacaccccctctcagtgcgtgctgtaaggtaggagcttcacagatggttaaagcaaaacagaacatgggccgggtgcagtgactcactcctgttgtctcagcactttgggaggccaaggcgggtgaatcacctgaggtcaggagttcaaggccaacctggccaaatggcgaaaccccatctttactaaaaatacaaaaaatagctgggcgtggtggtaggcgcctgtaatcccagctactcgggaggctgaggcaggagaatcacttgaacccgggaggtggagtttgcagtgcgccaagatcgcgccactgcactccagcctgggcgacagagtgggattccatctcaaaaatcaaaaaacaaaaaaaggaaaaaacagaacatgaaagccactttcccacagcctgggcacgtagctactgtggtgaatcacctttcctggcagagcacactcaggaaccgtcagctccaaaagcaccaaacagtttcattaagaccgtggctccttcgcagaagcacacggaacgcagactgacaagcctgtgataacattttaatggcctgagttcagttcccaataaaatacttaagtttctgcaatcatggagctggcattttcattaatactcctgattaattgtctgtcctaggaaaaggctcatcaccgtcacaatcccgatcttgctagttccttgcagggagaatcccagcagcctgggcttttccaccaggttaaagctggcaaagggcaaggaagactccctggcacctggtaccctccacttgccatggtaacagaggattacaggctctaagcccagctgctgtccttgcattcagacctcaccactcatacactgggacctggaactacttaaattgcctcagtttctttatgtgtcaaatggcgtttgacacataaagcactaatactaatagtacttacataataaggttgttgtaaggattaattgagttggtacaagtaatgtcctggcacgcatctggcacatagtgagtgcttcctataataaacagtagctgggtttgttgttgttttactattatttttcctccagaaaggcgagagttgcatcagccttggaagaggcaggactgagatgtttgggaacaagaccactttcacagggggcagccttttgagaaatgtcatgtctacttgatagggctttaaatatggagtagtgggaatctgcacatttggattcaaatcctggcttttccaatggctgatgatggaacccttataggctcaaatcactcacttctctgagcctccccaaaaattgagaataacagtttttattccatagggtagttttgagaattggtaagatgatcataaatgtagaagggcctggtactcataactgttttcttcatttatttatttagtcaacaatgttttctgagcacctaccctgggccaggcacactgaggtgggccttgggattcatcagggatcaaagggaaaaggcatcccatctccgtggagcttcacatcatcgtagttaaggtggataatgactgtctcgacagataggacagtggccaggacacaggccttcagtctggagcatgcttctcattttgaaataatttcttgttcagagtcaggttggaaggaaggccttgcaggggctgggtaaggatggcggcatctctgcgttcacgtctgtgtgctcaccatgagagcccacctctctctggcccaagtttccttctgtaatgtgaaagaggtggggttccatgctctcctcttcagcatcctccttagatactcaatctggcactcatcagtttcggaccctccatgctgccccaaaggaagccacactgcaccttcatccagtttcttaaacctgcatgttctctcttgcctctagaccttcgcccaggctattccatctgcctggaacatgcttccatacacctgccttcacttggctaactcctacttctgccttgtgccactgcttggattgaatgtcctctggaattcagccttcctggatgtccctgagctgggctagggtcccctctgcccacctctgctctttgattttccctgttcatcaccccagttatgacactgagttgtaactgggatttctaatctgtcgcctccaccaagcagcacactctttctggccagggtccatgtcttatttgtcttggtatctctagggcccagaatctggtacctagtgaatgtgtaacaaatattttctctgagctaaaataggaacacagggtccctgcaatgaagaccccaggtctggaggggaagacaaggtagcattacaagataacaggccttccctgcaaagcgtcagcactcagactggggcattgtggacaagaagggtggagaggagagaaggcatgaaggcatcccagatagggacacagcagaaacaaagacaaaaaggccggataagcaagatctctttgagccggcaggttaagatgggtagtggaaagctggaccactgtcaggttttgacccctccagacaatgcaccgtgatcttctggcttccatatgtccctggctgctgctgcctgctgcccactgagggacctcaccctccagactctaagtgatcttaagccaccagccttacaaattacagcagacagagggggtccaggcccttctagagatagtgttcacagcactttcccaaagctggttctgctcaattccctaaaagatctcctgcaatggggcctccagggtcctaaaagcaccatctgctcttaaagagtctcactgctcattagcatatcaaaggctctgaaatgtcctgcaggaaaaaactctgggctaacttttgtagccctgttccccaaactaaattgaatgaaggattctttttttatgacccacctacagttctgcagagatcctccagggaatgcagatctaacccattctctgtgcagtgaatggcagagaaaattaaagtgattgcatctattgcacacttacttttccttcgaggtaggtgagagagtaaataagatgcaggagagaattacaaccggagatataaaacagttgtcttacagggaatagtctgtttgcccagggaggaggttttcagaatacaaagtaccatttcttctccacgacatccccaggggagaaaggaaagtgaaagaagccctccaaccgaccactggagatgggagcatttctgctggtttcatttacataagtgtccttggcaatttgtcccaatttgtctcattataaatgatgtaaacatccgggcgtaatcacagacaaaatgggatggtttaaatgctgcctgattaaaaaccctgggttggctgcaatgacttgcaggcatgctaacggcttccctgcaagggactttggtttcaaagttctgagagctcaggagggtccctaggtctagttgcaaagtcatgtcccccatgactctgcaactctccacatagagcctagcaagaatgcatcatcttctctatatctcttataaggagggaaggaagaaagggagggaaggagggagggggagagggagggagaaaggaaagaagaaaagaaaggaaagaaggaaggaaggaagggagggagggaggaaaggaggaaggaagggagggagggagggaggaaaggagggaggagggagggagggagggagggagggagctaactgacattttcccctttgccatctgattggcatgaagggcaatgtaactgaggagtctggggaccaaagtgaatcctagtaatgtcactcacttaatatgtgtgattttttagaccaatcacatcatttggccaagcctcagtttcctagtctgtcaaatgggaatgatgatttgacatctggtgtgtctctcactactgttgagacattatataatgagagcatagccctttataaagacagggtttctgtcctctttcttacttcattctttccttctcttctttccttctaatagaaggtatagagaagacagcacattcctactgagctctatatggagagctgcagtcatgggggacactgtctagatctggggaccctcccaagctctcagagctttggaaggaaggtccctgcagggaaactgtgtgtgtttcttcaacagtgtatcctcagtgcctagcacatggtaagtgttccataaacagctgttgaagagacggatggataactgaatgaatggatgcttccatgggcaatgacacactaatctgaaaagccctgtatcaatgaaagaatcacttaatagtttaacttttccctcatccttcagaacacagatggcatgccatcttcccttcaaatctcttcccagtgccccacacagaagaggcacacttggacactggtgtctgatggacccaagttcacagcctgtctctggtcatcaggtatcatgaccttgggcaagaagcttaactctctgagcctcagtttccccttctgtcccccagggaaaatgagtcctgcccctcctaagggaggtatgagatgtaagaccccgaaggacacaaaggtttgccaggagccttcaggtaggaggcaggtaaggaggtctgctagattggaatgagtttctggaaggccccaaggagctcaaaatcagacctggggtgaaggtgtcttgaccaaaatgagacccatcaaagaagcctggatgaaggtgcccacagcatccatcagtgccaaaaacagaaacactttagcccaggatacaaggaacattttaaagcaacagagataagagatagttagaactcaggcctcctggctcttgctgttcttggcccataattagttgttatgggaccttaataaacttcttgccttcttggtacctttgccaaacaatctgatgaggagaatattgagtcatggtgccagggaaaattagcatattctgcaaattcctggcactgttaacactggattctgtccacctttagaaatcctcagatcactatgtcagcatcccccaatcacagctctccaacttcaaggagggttgaggggtctgaagaaggagagagaggcaacagagccagaaacccttcagaagatgccaagagcaaggtttggacccatagtccaccacttactaacttcaagagtgttatgagctacaaacttctcagtctccgttgactcatctcaaaaatggaagtaaaattatttaccatgcaatatgttgtcaaaatgcattgggtttagttcatagcaggtgctcaaagaatatcagttccacttcccttgtccctagagagccttgtagtggatgttgatgtgtcttccaacacatgcaccaacctttccctgtcctgtagcagttgagatggaatcatcccactcccagctccaggaataggctctgatgggcttgaacccagcagcttaattccattggttctctaggccttcatcattagtacaggaaaggcacttgacctaaattagttcgataagatttaagctcagaaatctggtttgttggatggagaaagagatgctttctttctctctggaaggagtttattgcaaaagtaagggctggggctgctacagccattgtgctaccatgagggaactagccatgataacaaaacttgcctggggaggggctacgcatcacagaaaatgatgccaaagtcctgctcaaactgtgcctgatgcctgcctgatctatggacttcttagttccatgtaatggattctctctatttttaaagccgtatcaggttgaatttttggagaaataaaacaaaaagcatcttgactaatttaaaaaatcttctttgggtattcaaccctcctaaactcacccccaaatccactgggagcatgtcaagatttttgtgagccgatttaggagatgcaaattcatttgccttaattggatctccaggaaatgacttctgccccctcttaaatcatttaaagctcaaagaggcatgagggccctccccaaggatgcaggtatcctcttgactgacagcctgtatgctctgcttccaggatccttccatctcctccctttactgagggagtctgctatgtgttagaggtgtccatcactggtcacactgggaagctgtggcagggaagctggagaaaaagcaagataggccccagaaagaacaccaactccagactcagggagactcaggccagaatcctagctcaacttcttccaagctcccaaagtcacactcttttctctgagcctcgattttcccatctgcaaaatggggatactaagggtcacctagctgggctgccctggagattccaagacattaggcatagaaacagtctggcctagaccctgtaggccagtaggcatttgatcaatggcagctgtggttgagatttttatcatcattatggctgcccttcctgctttccagggctagtgtagatctaagattataggggctgcaacgttcctcagtggagcagatgcagcaaggtagtaagagagggcattctcacttgtccccacagagtgtggtgtgggggagatctgtgagcaccccagcagccatgagggtcagcacttgaatctctgcaggtcagtcatactcctctttattatttttatttttatttatgtattgatttattgctctgtcacccaggctggagtgcactggcaccatcatagctcactgcagccttaaactcctgggctcaagtgactcccacttcagcctcccaagtagctagagccacaggcacatgccaccacgcctagctaatttttcaattttttgtagagacagggtctcactgtgttgcccaggctggtttcaaattcctaggcttgagtgatcctcccgccttggactcccaaagtgctgggattacaactgtgagccactgcacctggccttattcccttctttttatcagttttcaaagccatcagtatgcagagcactaggcccagaaatgagaggagaagagagatggaacgacgaagaccaaaacctctgtcctcaagctgctcataagccagtatagagacgtgtggagtctgctgtcctgagttccagtcccagttccccttgcaagcagccgtgtgacttgcagcaagtcattgaatccctttgagcctcactttccttgtctagaaaacaacaaaactggaaataatactgcttcccttccagtttgtcaaggatgaaggtgctttgcacggtccctggagcaaaatgtgttctcaatcaagattccgtctgtggtgggtggagccgcgtccttcccaaattcatattcactcagaaccttcaaatgtgacctttttcagaaatagcatctttgcaagtttaattcagttatgggtctcaagatgaaatcatcttggatttggggtctatccgaaatccagtgactgatgtccttataaaaagaagggatacaggccggggccagtagctcacgcctgtaatcccagcactttgggaggctgaggcaggcagatcacttgaggttaggagttcaagaccagcctggccaacatggtgaaaccccgtctctactaaaaatacaaaaattagctgggtgtggtggtgagcacccataatcccagctactcgggaggctgaggcaagagaattgcttgaacccaggaggcagaggttgcagtgagccgagatcgcgccactgcactccagcctaggtgacaagcgtgagactctgtctcaaaaaaaaaaaaaaaaagagtggatacagagaggcagtgaagaaggctgtgtgcaaagacaggcagaggttagtgggatgcagcgcgaggctaaggagtgtctggggccaccagaagccagggaagcctaggaagggttttcctagagcctttggagggagcacagccctgctgacaccctgacttcagactcccagcctccagagctgggaagggataagtagctgttgctttaaaccagtggtccccaacccttttggcaccagaaaccggttttggttcagtggaagacaatttttccacggacagggtgtgtggggtgggagatggtttcaggatgaaactgttccgcctctgatcatcaggcattagcattagttagattctcataaggagtgagcaacctagatccttcgcatgcgcagttcgcaatagggttcatgctcctatgagaacctaatgcggcggctgatctgacaggagcggagctcaggcggtaatgcttgctcgccagctcacctgctgtgcagccggggtcctaacaggccacagacccatccgtggcccaggggattggcgacccctgtctttttttttttcttttttttgagatggagtttcgctcttgttgcccaggctggagtgcaatggcacgatctcgactcttcaacctccgcctcctgggttcaagccattctcctccctcagcctcccaagtagctgggattacaggcacccgccaccatacctggctaatttttgtatttttagtagagatggggtttctccatgttggtcaggctggtcttgaactcccgacctcaagtgatccgcccacctcagcctcccaaagtgctgggattacaggcgtgagccaccacgacctgcccggggacccctgtcttaaaccaccccagcctgtgatactttgttatggtgaccctaagaggcaaatacaccctcctttccccaacctctcccctcagacgaaaccgatgcgaaaagtgcttcatgaagtttcaggtaaagaagtctgggacgaaaagggatagtgaggatggcgggaggggctgaactccaaatgggcttatcaaggctctgcaaaatggcgtgacggcgctgcccccttctggtggcctgaagactaacgcacatgatgtcaagtgcggggcccaagtactcaggaaaaggttctcatttggacactgggaggtcttacattgggggccctgagcctccagcccttccaaatctattctcagcaggagctcagccacacctgtgtcccagaactgaggccaggcccagccttcactccacgcccagccagccccaaggaaccgactccctgaggctctatgctccctgcctccagtggccccgtgtctgggaaatagtggccctggcctgatgccctgacctgggcaatccatcccctggtcctctcagctcccgggcccaggttttctgggctactttaaccagggcaaactcattcctcgagtacaaaataaaagattcgaacagcataatcaaataggtcatacccataaatcaacacatttgagcacctattttgttgttctttcactaatccaaaccatatttattgagcatctactatgtgccattctccagtagccattctaggtgcaggggatacagcagagaccttgaaaaaaggaacagtctctgatcttgctgagcttagagtcaagtggaggtgaggaggaaggaaatgaattaacaactaagtgaagcagaaggtaaccaattgattgactgacgaaggggtacaaacaacaaacaccttcctttctccaaactctatctttaactgtattctctcgttttccttcctctccattttacaatcattttacaacatctctggctattctcctatatttctgatcacttcggttctcatcacaataataatttcagttttcaagcattggaaagtcccatccaattaaaatgtcaatctcacacgcagtttaaacgtttcgcctgcccgtgagctcagacctgtcttggtgcctcagttcttgtgtggaggggaggagaggagaggggaggggaggagaggaaaggagaccggggaggtggggggggagaggggaggggaggagaggggaggggagtgggggagaaggggagaaaagcgcagctggcttcctcactctcctttccttcctcaccatccttaccctggcccagggcaggaggaggattggcagagtagaggcagggtcttctgtcttagctgggcctgttggtgactttctgttggccaacatgggctgactggaatgttctccagcatggcacatggtcatccagatgcaggctcttccctggggcactatagcagagagggctctcttccagtctattgcagatggatgccctcgtgagctgagttttgatgaacatcccatgtccccagccaccccattcagagcctctttctactctggtcctctggtcccagcagcagccctctgggtactgaggggagggcatctcacccaagccccttaaacctgctcaccttcttcagagcccacgtggccgcaggaaagtcacaaacccttgtgctcccacagggcacacgtgtgcacacgtgtgcagctaccttctctctagttggtacctgaggctgcctcctggattttccagtctctgtgttcccagacaaccccaagccccaagaatacaagagctctgtcaccaagcatcgggcctgtggctgcactacacgtctgcagctcaggacccctggctgcggcgtaagctaccagcatccccttctcatgggcaccctcatctccggctccccatcgctgggctgtgacctgcgggggcgcccctctatggaagggaaggagaaaaattcacagtgctatctactcctctgaatgcactcccaccaatttccttggaaatttctagctttcactgacatatctgggatggggcggtggtcacaaaatcaatcccactttccctcggctagtcttacaagcacccaacagctctattcagaatacagggctgcccagctacttcccattcattatccccaggttgcaagctttagtcaaaacccagaggcagcagggtgtctggttccacctgctgttaggatgatttcaggagtgcaaagtgttagaaacgcggtaaaacatgatgcttagagattaagtgggatggggactgggcagatgatgctgctttggacccagcgagtgaggtgagactgcgacaagacagagccactgagcagtgacctgggggatgggcattgcaggcaaggcagaaccccaagtgggaacaacctcactgggcttagcaaaactaaagaggcccaaagtatactgagcgatgaggtgagtggcgtgggataaggttggagaggaggctggaaccagaccctgcagggccttgcaggtgatgggaaggagtttggaaggtgctggaaggtttgaagcagaggagggatatgatcatgcctgtagctgctatgtagaacaactgtatgcatgccaggcctgtgccacgcatgctctaatcattactggctttaacccttgcactaacgttgtcatgcaggtaggagcatctgcacccagcaaatggaaactgaagctcaggaatattcagtcacttgtccaaggctccccagctgttaggtgctaaggctggattcaatccaggacttgcagactccagtatcttggcttttctaacgagagtgtgctagctttctaatgggggtggggaaggcagtctgcccccctcccatggcaccgtgagcaggtgtcactgctccagccagtacgcctggacaccgactaggaaggagtatgtgctactaggagggatggtctgggctgactctttgaagttgacaaggagttgcataatcccagctaataattatgctggaccaggggcagagacattactccaagggtgaccaggtgtggagaagaggctgctgactccggggccccaggacctggcccccaggtctcattgcccgagtgctgccccagaaggagtagaagctggagctgtccgggccacagccgaggctgggtgaatgctgcagtgaggctgccgcacaagttgcgtgttgtgacatttgtcttctggaggggattgggatgggctacttcagcatttaaaaacccctactaggtctgagaaatcccctcagcttatgagcctgggtgggcagcaggccttctcaagaagcccagaaggccagatgctcacttcccaggctctcttgcggctgagctgagagcaggcacctgaggcctggcaagtgtgacagctggtgacacagacagacagggacagggagatgggactgtgcctgcagcggtagccctggccggtgttcagtggggccagcatccgtgtctttcctgggggccagtgggggccgtggctctgacgatgcatccctcccccacgttttttctcttcttgtcttggactttgcagggagcactctgcttttgggaacaggagctgggtctctggccattctccgcagcccctcaccattcactcagtggctctcaaaaaatagaacctggggcaaagctgttcttggccccaaacaacatgaggaaaaataaataaataatgtacctggtaactgagagagttccctctgcatcttgggctctttcaatgagatgtcctctgcctgcagcaagccccaagggcttccctcaccaggaccagcaccctggtttgcctgaccccacacctgccaatgccggggcaagaatgtcccaggctgccctggttcccagagctgatgcttcccacagtgcccagctgtgctggcatggagctaaggacagggccagtcccaagaaaacaacaaggctccagggccaccggccactgctcaggaccctggctgaccccacagatgcggagtgcctgagatggctcatgggtgacccccaggcatctggcaaaggtcacaatggctgtttggcttgaagacagcccttgcaagatctgttttgagccaacctgtggcatttagccctccctgggtgacaaataaaaaggctgaggcttgtaggagccaaggtgggagtccccatctacccccaccctctcagcccaccagggcccagactggggaactgctcctgcttcgagggacagggctgaagaggagaggggcttggggctccccttgatcccaaagctccagggaccccaaagaaacgtatcagcagcatgagaatatcgggtgacctctctctctagtaaatgtcaaaacttttaaccaaaatgccttcatcccccagcgccaggcctgagctaatctcataggtgtcaggactgggagcctggacccctcttccttctgctcctgctttgcagagaagtgagtggggaattcccgcctctgggaattcagagacgaagtgacagagacagcattggaagataagaatgcagccaaagaggtcttcagggtagcgtgtggcctgggcgctgagactattgggcctagcaacttctcaagcagtctattaaccacagccggtagccagcttttccccgcccttctcccaggcacacacagccacctccatcaccaaaggtcaggcgaaccacctcccatggctacccccagcctgacttgctttatagaaatcatggcatctcatcctcacaacagcccacactcacagtgaatcttggccattatgacaactggggacactgaggctcggagtggtggaaattctcagaatcacataacaataagtgttaaagtcagaatttcaacttcatctctctaactccaaagggcgtgtgtgtgtgtgtgcgtttctggccataatcatattgtgccctacaagccccagtgaggaatctgctaggaacactggtttggggaaaaaatgtaataaaatatgtgatccagaaggcggccttggtacctgtcataaaccgcagcatggggtactcactatgcctggggtctgggctctgaaggcatgattgaatgatctcactgcaggcctggttgtcctgcgaagacacccgtcaatacatgaatattgacacacaacgctgcagtgcacgcgcttctggcaggggagctgctgcactcgagggcagctcaaggttaatttgcagggttcatgtttggagtttctgagcaagtgttgcagctttggcccccagccccctgaggggagctctggccgtgcatgagggtcagacagaaaatctcctttcctccatccaggcctgcagtctgcagcactgaggtcagcgctggccacaagcccaccctgtgcctcgtcagccccactgagcctctccatctatcatgccacaggctgaccctgaaatgcaaaatcattctgtcctcccgccctccactcccacctcgcacatctatggatttgctgttcagaaaacatctgttccctccttcgcccctgacatacgcatcgatctcatgctagcccagctgcctaagctcaccactctgggagacagactctcagtcctcatcagacagagatgtagggggctgtaagggacggggtgcaggtagggcctgaggattccgacaaggtgagccatgggcaggggcattgttcatgcagggacctcctggccaaggtcctacgtcaaggttagaaggaaagagtaaatgatcggataggctaagacagcaactcagcaggccaagggactcctcccccaggacctgctccacccttagaggggtcccggacagccaagccctgatggagttggtcagcaaccaaccagccctggggccaaggcctgcagaagcagagaggaggggtctcaggcaggccagaggtgctagctgggatgcctgggtcccccaccccaccccagcacactgtcctttctccaggtgctcagttagattgagctgggtcccatcttgggcctttgctggtccctccctagaaagtctgccccctccccctgcagggtggcatcagcattcaggcctggccctgacgccctcctctctgggccaccttcacctccacaaccccggcaccagcacccatccccaccacatccccagcacgcagcatctagtaagggcaccaaatgcatgcccagacatatgagtgaaatgaattaaccctgaacctgaaaaagggcaaccaccacacaagattctctagaaacaatgtgaattgtgcagaaggaaattaaccctactccatccagcccatcctaaggcagggacttggacctgttcctcttgatggggctggggctgaggcgggcaaggcaggcaagtgctgaacagttggcaacattgcccatcccgtctccctgcaccaggctgggcctggggtgagggggtgggggccggggtagctgggctcctccagcaaagagcaggactgagtccctggtgactattaggtaaaaggtccctgacaattttgaggggccagatgccaactcgagggatacagagaagatctaggcacagtctttccccaccatgtcagacaaaaaggttagatacaggacctgatatgttataaaactcaatcaatatttacttagtgaataaatggacggatggatggatggatgcattaggcagccaagtgggcagcaccgatgacttaatgtactgagtgctccgactccagcaacatgcattcattgttcctactgtgtgccagtgaacaagagcaatgaactcaatgacttctgcccagggtgggccagggaaccagggaagactctccaaaaaggcagcatttgggctgggacgtacagatgagtagggggtcgagtgtgtcgttatgtcgctggagcccagaggcgtccatcaggacttgggggagggcagatgaaagggccttactgcctaacttggagccactgtatgtttcaaaacaaaggagagagaggatcctgggaaagagaaagggtactctaggcagaggatgtgaatgggcacagcacaggtgagaacatcaagaccaggggtcagggaatctactggtaaacaattgtaccccaagggagcaatcacagcctctccatccacagggaaatgcctggtggggaggaatgggaggaaagaaacagattgcatgactgtgtcttgaaggtctaattccagagtacagcatcacccctatcttccaggtccagaaactgaggctcagagggagactttctgatgagtgcagcgtgcagataagagcatctccaaagctacctccttccccagtcacaccagggcataagcaactgataacagctgtcagcacgggacagtggagggaacactaggttaggaataagggtacgaggcttgagtacagattgtcaatgactcagtgtgtgaacttggtcaggtgactccaaccagatgacttccttctctgagcttctgttccctcctctatgaatggggacaatcactcagcttcacaaaacaatggctgcgaaattgcctggtacaagagagagaacttccagtgtgtaggggctgttgtcctaactgcccagccccctagataggtagttatgtcatctgtgaaatgggtgttagaattcctacctcccaggacagctgtgggcagaaaaccaaagaatgtgtgtgagagcccaagcaccatgcctggcacatagtaggtgctcaggaaaggctgagggtgcagctgctgtccacacacatggtaccactgccccaggaaggggcttcaggaaccaagagcaattctgagcactggtgactggactctgccattctccatttcaaacgctttttgaaagcagctccagacccaagcaggagagcaggaggcaaaagaaacgcaggggctttcccgaatggaattttagaaacacacagaattgtctcctgcacagaagggaagctgtcttccacagcacagagccaccaggccccagactgctggcttatgtatttgtcattgctcatcatgaatggatgccaggaaagtctctttgtgatgggggcacaacccctcaaatctcctcccctccagatgccatccactggagctgagactcccaggtcccctagggcttctctcccaggggcctctgggctccccaaggccacgtgctgcccccactagagacctgggccagtcctgaccaggggaaagagtagcgccgacaacagccccagatggtatgtgcactggcacatactggcagctgccttcatgacagcaagccataggtccaaatcccgccccttcacagggacattcccaactggtcaggggtggacctccccttcccggctgtctttggtgtccaggacgatttgccacagacagggggagctaaaggggcccacgcttgaggccgctcagctctgagtcctcgccggccacagaggaccttcgtgcctgtcctctgtcctcctgcccagtccccaggccaggctcagctggagttggggagcagaaaaacacgcatctgaatcaaggctctcggagcctttgcttctgcctccaagaggcgagggaaaatgaatacccaggcgagcgagcaagagagaccctcagaaaaccccagatgcccctggaatcaagccctgtcccaccaacgccacgtggattgacaggctattagtcttcctgtaattaggattctcgcctcaaatcttgtatctttttcccccagaagattctcctccagccttcaccactgccccctggcgcttccttgcaaggcttttgaagaatcctttgcagagaagcagcctcctttggcaggggctgcagagcactctgcctccctaggccagggcgaaccaacagaggcgggagatgaggaggagcagcgcggctctgctgcgtggccctgggcaagcaccacaacctctctgggccgtttgcacattcttaccgccagggatgtgggcggtaaatgaaagagaccagcacaaaccagtgtcagctcccttcctcgattcctaaaatgtgatgcccaaagatgggccagcctcctgctgtgccttctctggggggacatttaataagtggaagagccctggctctgagtcaggctagaatcccagttctgcacttaaccagctgtgtgacctcaggcaagcaacctggcctctctgaacctgagtttcttcatctgtaagtgggaacgctaatgctgtgctgagggttccatgggacaaccatgtaaaagcacccagcacgcacccagcaggcagcaggtcctgcacagcgttccctcgcgtgggggtgggttggggcttgagcacgggttgaacctggaagaggccatttccctcccttctccccgaggaataattgtgaattcctgggtctcagaggaaacatccgctttggtggtcagaaaggacatcctcctttgagcagggggagagcagagggaagggggttgcgagggtcacgccttccccaggcattctcggggtctctccagcaaggatggaggcggccaggggcttgggcggtgtggggcgccacctggcgtccagaagaggtaagacaggcggagcgggaccctccgaagtgggaggaggacgctggtcaggggaggaggggaccgcgagagcgagagcggacattctaccaaacacatggacaacacagaagatgaggaaaatgagcagggcagctagtcataggagcaaattttaaaaattaagtgactgaggtagtcagggggcctcactgagaagtggcttggagtaagacctgaagttggggactggatatgcagatgtctgggaggagagcttttcaggaagaagaatcagccagtgcagaggcctatggcagacccaagcaggaggcaaaagaaacgcagaggctttccaggatggaaaatgaagaatcagccagtgcagaggaatgtgcctggatgtgttccaggaatgtttcagaatgagctaaaaggccagggacagagaactaagaggagaggagaggtcagagagatggcggtgggcggaaggagggggcggggcggaggagggggcgagggggcgggggggcggagggggggacggaggggggggcggggggcggggcggaggggggatggggcggggcggggtgtggctgtgcgtctggataagggttgtggcttttatgctgcacgagaaggagagccattggagagcttggggcagaaacaagagctgatgacattttaatccctctggctgctgtgctggggtagactgtcagggccaagggcagagtgtgaaaagcgcccaagaggcttctacaagaatctagtgggagatgctgcggctctggccaggttagtggcagtgccagtggtgagagggatgtggttctgcgggtgttgtgaaaatggagccagcgggatttgttgacagaccaaagttgaggtgagacagagactccggaatgactgcagggttattggtctgagcagggttattggtctgagcagataaccagatggagtcaccactaacttagatggagaaggctggtagagtgaggaaatatcgggaacttatgttcggacttgttaagtttgagatggctgggagatatctaagtggagagggcaaggaataaaatgcttcctaaactccagcatccattcagtcccctggagagcttgttaaaccggatggatgggtgccacgcccacccctgcacccctgagttgcaataggcccaaaatgattcaataggcccaacatggggcccaaggttctacatttccaacagcttcccaagtgatgccaatgctgccagactgagaaccacacttcgagtagcaccaaagtaggcaactggatgtttgaggctggcattcaaaagagagatcctggcaagagatagaattttggagtcattggcacggaaatccacaaaacgacatgagctctcccagggagtgtgtgtgtgtaaagagggaagaaaagagcattgagtcccgagccccaggctcttcaatggtaagaggttggcagattaggaaggaccagcaaagactgggatgggaaaccactgaagcaagaggaaggccaggcagatgtgtcctgaaagccaaaaagagaaaggtcatcattaatatgatacattttgcaatttgtttatatgtaagaggagattaatagctcatagcattcccaggcattgctgttaggaattgcagctccaggctggcaacccttaaatcacaaactagattgtcaagaggactgcctggaattccagctctgtaagtaatatgctgtgtggcctcagccaggtcacttcacctctctgggcttctcttgcttccatatataaatgtaataagaaaatcttttatttattatttatttatttatttttgagacagagactcgctttgtcacccaggctggagggcagtggtgcgatctccactcaccgcaatctccgccttccgggctaaggcaattcttgtgcctcaacctcctgactagctgaaattacaggcacccaccaccacacccagctaatttttgtatttttagtagagacggggtttcatcttgttggccaggcttgtctcaaacacctgacctcaagtgatctgcctgcctcggcctcccaaagtgttgagattacaggagtgagccatcacgcccggccaagaagaccttttaaagtagatgttctaagagtctctttcagttctgaatctctttgttatcttacatgttaccccctcagagatgccttccctcactcccctgtccaaggtagctctccacccaagtcagcagtcatcacagaaccatcacaacctgaagccctgtgcatgttgctgtttatttcctgtttacatcacaacctgaagccctgtgcatgtagctgtatactaaccctagagttagtatagcttagttaaactttcatttattgctaaaggtttatcactgctgtctctatcagcctccctgcactgtaagggacaagggggcaggtccagtttctgtcttgtttcaggttttgtctccagccaagataagtatctttgcaaggctctgtttttattctgaaaggaaattaggagctattggagggtatggagtggaaggggacagtcttctgccttggatgtataaaagggatgctgggccacgctgatgggctagaccatggcaggcagagaaaacaggcaggaggccaggcaggggctgccagtgcccagacacaggccgggaggtgcaggtggcagtggcaggcagtggccaggccctgggtatattttgaaggtcaagccaacaggacttgccagtgggctgggtatgggcatgagacaggcaagttctcccagatgtgactccgatgtgacattttggagactccctcaacacccacctggggaagacagaccagttgggaggaaatatctggagtctcattttattaattctgagagtttgttgtattagacagtgaagcggaaatgtcaggaagtcagctggaaataggagtctggagttggggggaaagcctagccagagacaggaattgtggcgtcattggcgtagagacagcgtttaaagctgtgacgctagatgggttcaccaggggaatgagagtcgaaagagaagagcagagcagagctgagccctgaggggggcagaaaggcacacagggacagtggaggcaggaggcagaaggcagagggtggcgggccaacagctctgaaggtcagtgctctatcacaggggggtggccgaggaggggcccgaggctggaaccaggaggcactatcccaggcctgccttctcatgccagcagcagtgatctatcctcaaggagaatattgattgagcacctactgcatgcagagacctcatcaatggctcaatcaatatgacacggccacgcttcctgatccgagccctctgagcaggtattttccatcctggacttatccctgtttctcaggagagggatggacccaagagacaaatagttcccccaagatcgcacagcaagccagtgtaaaacaagcatagaaaccagcttttagggggctcaaggtgggggtcagaaaatgaggtgagagcaagcatttactgagcacctcctgtaaatatctcctacatacgaagtgctctacccacattactgaccacccaataaaggcaggtcctgtaattcccaatttgcagatggataagcagaggcttaggggtgtgaaacaacctcctcaaggtcatggcttctaagtggtggagccaggcctgcaaaccaggctgtctgaatccaaaatccacctccaagtccacagtgggttggccccacccccaacccatccccatcaccaacaggacggtggtcagagtccactgaatgaaagcatgcgtgcattcaaaatagacagccaatcagcagccttccatcagaaatgtcatctttatgacaacagcatcgattccaggcgtaccctgcatatgtgaaccaagggggatggtggattgtcctttccaagcacttcccagccccttagagtcccacaggcccagaaccacggcccttgacaccctctacccacccctgctcccccttctcctcagaccccgagtgtctggccaggctttctcactgggaagtggccactccatccaaatgaccaccgcacccctcctcaccagcttccctgcttctgccctggcccccactctttgagtccattcttcaaccagcagacaaaggggtgctgtacacgcctctgcacagaacccctccaatgccttctgtctcaactcagagcaaagggcagcagctagcacactccaaacactcccacccacacctcagctcctccctctgtccctctgctctattccctcagatctgacggctccatcccataaacgtggcacacacacacctgcctcaaggcctttgctcaggctgttcccactgcctggagcactcttcctgcagacacccacgaggctcattttcctttagtgaggctttcctggccgcctcttccagataacaactctcctctccttccctgccctcctgctcctcctgttcgcgctacataacagactctgtggggccttggtttatgtatttccttctctcccctactgaaatacatgtgagcgatgctggggcaggccgactagaagaagcagactatctgcttcttctccacccttagaatggtgctgggcccagaagaggcatgcagtcgatatttgctgaataaatgaatgtcagataaagtggtgtggggactccaggggaaagatttgtcattctccaccctcccagttcagcttaaagcagagaagtgagaggtgcccaaaaaggggtgtgtctggggggtggggggtggggatgttccaagatctccaaggcctggattttaagcaaggtttgagatgccagcaagagggcctggcattgccagattgatagtctgcatttcagagaaggacaaccccacctctgaccttagcccaagcctcaacagcctgctcaaggagatccacccttagtaggaggaggcagccaggccaggttccagtccctgccaccgcttgccaggtgtgtcttgggcagcagttgcctttgctcggtggtcttcagctttgccccctgccaggcacgtgctggcctcctgcctgcatcgtagctcatggagtcctctcagtcacctctgtatgccctgcagcatccccagttctcagtgagaagagtgtgctctgaaagttaagtaacttacccaaggtcacacaaggtctgagtctcaaatgcatacaatttgaccccatagtctaaggtcttgaccgcaatggaataagaaattattttaccattctgagtggcagtctctgaagactacagcaataattgatgcctctcagggggataggtgtgtcacttacaggtgatagtgaggttgtcctcagcctccctgctcttcgttagacctccctcctcctctctacccgggccaagcgtccaaggcaaccctgtgtgttgcattgctcttgggggcagccagtcccccacataaagtggtgtcttccttcagctcctaacaagtcatgtggccattgcccacactacaacgacagaggaagcctcaggggaaccctcctcctctcccgaatctccgggcttcctgcatccctgggaggcaatgtccattaattccagctatgaccagcagagggcagcagcagcctggggaagacccagaggcccaggcctaggggagaggccggtgtctccaccctaggagccccaattcctccgcagcaggagcagacacacaaagaggagggcgagcaagggtcctccggggcggaacacctctgccgcacctgcagcagccttgctctatttcttcacaagcttccccatgacactgacccaaggctgtctggccactacagctgctgatgatgattagcaataataataataataaacgaaatgccttctgcttagatcatctttaatttcccctccagaatgacattcgactctgcttagagttacaggcagcccagcaattactgagcgcaaataccgtgttcacccgcctcacctcatccacgcccccacaacacccagccctgagactggctccacgatcacctccactttataaaataagatatcaaactctgaacagaacggacgtctcaaaaaatgggcatattacatttaaaccctcaatctgttgggtatttgagtgaaatggacatacctccagggagtcggtggcgagggccggctctgaggacttcctgggttgggatcctggctctgcaggactgcgtgaccttggtgagttacttcatccctccaaacgcgctgttctccttcatagaatggagatgaccacagggccagattcataaggttgttccttgtaatacaggtgaatatccatacccagcaactgctggaccacctgtggtttcaaggataatttccctcccacgtccccgtggcccttggaaccttcctctcctcctgtctccccctgcccccatcactttgtaattgaaaagtcatgattgctctcccaggtgtagcactgctcacaggtcagattgcctgctctgacgtagtgactcagttggatgcggttcagctgtgtatgatcaactccctccccctgacaaaaacattattttgcatcacagagaagttgatttctttcacacataaaagaaggcaaaaagtggtgcctaaagggctggtacagcagcttcaagaaatcaggaagaacctgggctccttctgccttcttgttctgccaatatcaccccatggctgccacttcatggcccaagtggaaccatggagcaccacccttcagacccataggtgacaacagcctgctctgtgagagtggcagtggcttccagagagacttaggaagtagaatcaacaggacttggtgacagatttgccacagagctggggaacagggaggtccaacggtgactcccaaggagctgatgtgagaaccagagctgctgtgaatattgttcccaactcctgagacagggacagtggtcccgtggctaggaagtggtaggcagtagagagtcacaatgcacattagtatatcaacattgtgagtagggcacgcagggaagaaacctgttcaacccagccccgtgctagaaagacatcagcagggcctgcaaaagccctgattaaatctcacaagtttgcacctggagccgccatcttgaattgcaggtgaatatcagcctttggtttgggctgtgtgccccagatgatggtggtcccaaattacataggccaatatccagagctgggttaaaatgaagcatttcgaggaaaaaaatgcaatgaaatttgtttaaccggtacttcaggcttttgagcacagaacagcgtccatccctccaaacacacactgaggatatacacttagccaggagggaacataaggaggggtggacaagccatgtttactaaaatctctcagtgtgtgccaggcatgttcatgtatattcaggaagaagtgtcagtatttaagatcctcggcccttgcccgagtccccaacacgccttcttgtctggagaactgtaaatcttggaaacatcttgcaaggggggacacctcacagaaggcaggcttggcatgggataaacagaatcgactcctctgcttccttctgatgcacagtgaatgggcaggtggaagcatcgttgcttaaagaggaaccaaaactccaccccagagctgctaattccttttggcttgcagttatgcagagggctaaaaaatccaacgaatcacaaatcccctggttgctaagtagaaagaatatgttttggctgctgctgttcccttccccaaggaaaagattcaagcagaggcggtccccacctctcaacacagaaagcaacatctctgattgcctctagacacaccttcatgctcgtggcactttgggaccctctgcccgctggcttatgggcatggcttccccatcactctgggtccttgggaagagcctctttcccagaccccacctctgtgcctcatcacatttctcccaggctattgacttgttcaaggttaaggtatgaagagagtcatgcagcagccctacctggctctgctctgctgggggaagccttttcagagcctgcctcttcctcagcatgaggggctgctcgggcccagtcccagaggccatgctggtcccaggggaaggtggccgtcatccccatctgtgttttctcttgcaggtaagtcatgctccagcagtcgggagggttgtgtgatgacacacttggcagtttgggagcaaaagccgccacagtaagacacaattgattcattgcctctcaaccctctgctggggtggactttcatgcgtggacttctgtccccaaagaggcttctctgggtctggaaagggccctagccttggttgggggaggcaaaggggtggcggcttccaggtaccatctggccaggaaccggctccattgtctgtgcatgtagcttgcactgggctgcctgctccaagggaggcatctccccacgatctacgacattggcttcaaagagctgctcctggcagcttcgaatggctgagacctactggcatgggatggaggagtgcagggagcttcccgggacctcgctagtcctgcctggatgctcagaaggccctcgtcctcggtggcatgcagcctcggccatttccaaactcacggcatctcacccagccatgtcacccacccccggctctgtcgcccttcccatcacctttctcccacccatcacctcacatcaaggtttcagccagcgggaaccaggtttagactccaattacctgtgcgtgtgggaggttggattgtgacatctttggagggccgggcttctgaagcgacatttgatttctggtactgaaatgtcaaagggtcctgaggcacccgctagggcagcacgcggagcatccacctgcgtgcgcatcctgggctctctctgggccacttggtgctggggacatgccgggagctggtggtcagccctcctcctgcctcctcagtgctgcatcttcaccttctgcagctgcctaccagaagcagggggacctggaaggcaaaggagagggagttggcatgtagtgagcaccgactgtgcacacagtgccagcaaggagcttcacactcatctccagcgtcacagctgcccagtggctgtggaagccgatggactgggccctctcccagtacacaatcattagagggtctcagttcactgagtaactgtgggagcagcacggtgcctccatcagcccccagttctgctttcgaaacatcgtcaccatcgccaaagcaaagcctcagacctgcaggccagcgctcccatgccccatagccgggagtaaaggacagatgcggggaatctggaaggagattcacttcaagcaccatcccactctatttgttaaacttgtgctcctgtgaaaactgcttgtgtctgcatcaaacccagctagggagggctgagggctaagggtaaacctgggagagttgaattccagtgctgtgattaaaaccaatattccacataatgcaatgtaacttgctcacatcgtcccatgtaatctttaaagccacagcccttttgcaattgggattattatctccattttacactggaggaaactgaggctctaagaggtgaaatgattcacccagttaggaagtgatgagtccagatgtggtagactgaataatggccctcacaatggaacctgtgagtgttcccttagatgacaaagggcctttgcagatgtgattaaattcaggatcctgagattgggagacattatcctagattatccaggtgggttctaaatgtcatcagaagtgtcttcataagaggaagacagagattttgctacagaagagggggaaacatgatgatgagtcagaggctggagtgacacctggaaggggccatgagccaaggcgtccaggtggctggaagccagaaaaaggccaggaaatgggttttctctgtgagcttccccaggaaaccagcctggccaacaccttgactttagcccagtgcaactgactccacatttctggctccagaactgtaagagaatacatttgtgttttgttaagctagcaaatttgcagtaatttatgacagcgctatgagaaaccaaaacaccaggattatgccccaaggatcctgatgccctccctcctctctgctctgcagtgtgctggagctcacagggctctgctgctgggagttagtatctagtccaacactttacccactcaccccccaagctaagggactcctgaaatcagggaccagatgcataataggtgcccaggaagtgagactcgccttccccagattaagaataaagaagacaaactatccacggctgctgtgagcctctcatcagacctcagcttctagggcagggtccctgcctgtctccagtatgtggcctctgtgtcttcttcgccctccatccccacagtgggacgagaagtcatcaggaaggcaggggatctgcaggcagccatcagggctctaattgcagctggctgggggaccatgggtcagggctgccaccccctggctctgtgccttcacctgtgtaacgaatggggcactcacagcccctctcaagtggtcctggggatgaagtgagaaggtgacatatacaagtgagttatacacgttcctgttctgtcactcaccagtgctcactgggtgggtcactgaactcccctcagcgtttccttctccatctgtaaaccaccagtgcaaacctttcccagatagtgctgacccgaagcaggaaccagtgcccctctgccctcagtaagtctgccagcagaggaagcccatagagggtcttgggaaatgaagccaacagagtcaagagggtcagatgatgagggacttcaagtgccaccttcatcccattctttctgcaaatattcaccacacacctacgtgacctcaggctctgtgtcaggtcctggggatgtaatggtgtccatgaagaaacaaggtccctgccctcatagagtggcctgacatatgcccgaggcagtcagcagccgagtgcgggagactcttgagcagagattgagtgtgttgatatctgtaggcatcagcctggctttgctgagtgagctatatcagagtggaggaggccagaggcaaagtccagactccactggatcctggattgaggggagaaggggctgggcggaggagcagcctgagcacctgcatctcactccaactgggtgctgatttgtccccatggccccagcacccaggcaggtcaccaagtaagctcaagacaaaaatgatgagtgactcaacagtgtctggggacaagggagggagagaagaactcaaaatgactgaggtttccagctaccagaaaaatggaaggaccttgaaacaaatgggccatcagcaggggacactggctggaagcccagagtccagtcagctctgtaaggcccccagaataggcatttgacttcaagtcacaggcatttcagcaaaagcctctttgctacagtgattatggtgaagcagatgcccacagctgagatgggcaactctcaggcctccagtggggacagagaatccctgggccccaacatagcttggcctgaagatctgagtcaggcatccaacctcttctgctcagctctttcaggaagatgtgtatactggcctctcttgccgcaagggtccaccaccttccttatgtgtgacctaaggcttctagtgctggctcagtggctaatttgagcataagcacccttgttggtaaaatgaaggataggtgtagatcagcatttcccaaagtgtgtgcttctcagaaaattaggtccctggttgtctgtagaggttacttaacaaagagactctgtagttatgttagaaataaatcttatgattaccaggattagtctctttaaagcttgtctaggtgggtcacaaatccgcctcagtcaggctttaaatggggaacagggtttaaattggatttaaacatttaaaaaccatgctaacaagaaccaaaagaaagtgagagtagctacattgatttcagacagagcagacttaaggaacattgttagggataaggatggatattacataataacaaaggtgtcaatactccaagaaaacataacaatccttaatgtgtgtgcacctaacaaccgagggtcaacatacagaagacaaaaaatgatataaatgcaaggaggaatacatcagtcaactgttacacttggaggccttaacacccctctaccagaaatggacagatccagcaggcagaaagtcagtcaaggcatagctgaactcaatgacactatcaattaactggatgtaattgacatctgtaggctactcatccaacaagagcagatatcgtatttttctcaaacccacatgggacgttcaccaagataggccacattctgagtcattaaacatacttaacaaaagcaaaataataaaaatcatacaatgtctgctctcaaagcacaatggaatcaaactaaaaatcaataacaaggagatagcaagaaaatcccaaaatacttggagattaaacaacactcctaaataacataggtcaaaaaagaaatcttgagaaattaaaaaaaaatactctgaatcaactacagatcacacaaacatcaaaacaataataaaggaatattatgaacacctctatgcccacaaatttgacaacttacatgaaatgaaccaattctttaaagtaaataatctgccaaaattcgcacaagaagaaatagataatcttaatagccctatgtctattacagaaattgaatcaataacatcctttcgaaacagaaagcaccaggctcagataggctgattggtgaattctaacaaatatttaaggaagaaaatgtatcaattctctacaatctcttctagaagataggaacaaaggaaatatttcctaactcattctatgaggccaatattaccctaataccaaaaccagacaaagacatcagaaaagaaaactacagactaatatctctcatgaacatagatgcaaaaattctcaacaaagtatttgcaaattgagtccaacaacgtataaaaagaattataagccatgaccaagtgagatttatcccagttatgcaaggctggtccaacatttgaaaatcagttaatgtaacccatcacatcaacaggctaaagaagaaaaatcatataatcatataaacagatgtggaaaaagcatttgacaaaatctaacccccagttgtgattaaaactctcaaaaaacaaggaatagaggggaattttctcaccttgataaagaacatctacaaaaatcctccagctaacatcatacttaatggtgagaaactagaagctttcctactaaggtacaaggcaaggatgtcccctctcactcctccttttcaacatcatattggaagtcctaggtaatgcaatgagacaacaaaaggaaataaaaggtatacacatagggaagggaaaaataaagctgtttttgtttccagatgacatgattatctgtatagaaaattgaaaagaatcaacaacaaaaacaaaaacctcatgtaactaataagctattatactgaggttgcaggataaggttaatatacaaaagtcgatcactttcctatataccagcaatgaacaagtagaatatgaaatttaaaacacactaccatttacattggtaaggtatatcccaaaatgaaatacttataatctaaataagtataaatcaaataacatatgtacaagatctatatgaagaaaactacaaaactctgatgaaagaaatcgaagaagagccaaataaatgaagagtattccatgtttgtggataggaaaccttggtattgtcaggttatcagttctttccaacttcatctatagattaaatgcaatcccagccaaaattattggttattagcaactattaacaaattattttatggatatcaacaaagtgattttaaagtttacagagagaggcaaagactcagaatagtcaatttaatactgaagaagaagaaaaaagttggaggattgacacaacctgattcaagactaactctaaagccatgataataaagacactgtggtatgggtgaaaaatagacaagtagatcaatggaacagaacagaaagcccagaaatagacccacatgaatagagttgactgatctttgacaaaggaacagaggcaatacagaggagcaaagacagttttttcaacaaacagtgctagaacaactggccatccacattaaaaaaaaaaaagagtccacacacaaaccttgcacccttcacaataattaactaaaaatgggtaatagatctaaatataagacacaaaactataaaactcctagaatataacatggaatcatatctagaagatcctgagtatggcagtgactttctagatataacaccaaaggcacaatctgtgaaagaaataattgagaagttggaattcattaaaatttaaacctctgccctgtaaaaggcaatgttaagagaatgagaaaataagccacagactgggaaaaaatatttgaaaaaatatatatctgataaaggactgttattcaaagcatacaaagaactcttaaaaatcaataattagaaaattaaaaatctgattcaaaaataagcagaagacccgaacagacatttcaccaaggaagatatacagatggcaagtaagcatgtgaaaaaatgctccacatatgtcattagggaattgctaattaaaacaatgatgagatgccactacagaactcatagaatggccaatatccaaaacacttaacaacacaaaatgtaggtgagaatgtggagaaacaggaactctcatcagtgcttcgtgggactgtgcaaaacagtacagctgctttggaagacagtttggcagtttcttacaaaactaaacagacccttaccataagattcatcagtcatgccctttggtattcacccaagtgaaccaaaaacttgtgttcacacaaaaaactgcatgtggatgtttacagcagctttattcataattgacaaaacttgtaggccaccaagatgtccttcagtgagcgaatggttaaataaatgatggtgcatcctggcagtagaatattactcaagactaaaaagaaatgagctatcaagccagtagaaggcatggaggaaccgtaagtgcacattactaagtgaaaaaagccaatcatgcttccaaccatgtaacattatggaaaaaagcaaaactatggggacagtaaaaagatggctggtttccagggttgtggggaggaagggatgattaggtggagcacaaaggatttttagggcattgaaacagttctgtatgctactacaatggtagacatatgtcgtaattcatttgtcaaaacacagagaatgtaccaggagtgaaccctaatgtaaactatggactctgggtgatagtgatgtgtcattgtagattcctcagttattacaaatgcatcatcctggtgtgggatgttgatggtgggggaagctgtgcatgtgcgggagtagggagtatatgggaactcttctacttcccacttaattttgcagtgagcctaaaactactctaaaaaataaagtttattaatcaacaaagaacacagtgagctgcaacttcataaccagtagattgacaagaattaagaaatttaataaagaattgattagaatatggagcaacaggaactcttacacattactgatggaaaagaaaattggtatacctactttgtaaatagtttggaaatgcctagaaaagttgaatatgaccccaaaatgacctaataatgccactattaagtattgaccctaaaaaattattgttgaacgcattttttaagagataaatgcaaaaacatttgttgcagtatcatttcaacagcaaaaactggaatcaatttaaacagctctcagtggttgaatgaataaactcattttatgcaaaatgaaaataaaaatagatatgggaacaagatttactatcaagtggttttctcaactttcctctcttcttaagaatattttattttgcctgccatcaaaacttttgttccagggcatccatggtccattgtttagtttctgcactgaacaaaggctcttgatgaaggagtgagtgggagctgaaatccagccatgctctgctccccaagccatgcatttgggtgcaggctctgtctctacccagagagaggaggcatcttttacttcagatattgatgtcatctattccccaaatccagtgcttacaagtctggatctgccctgtgggaagtatttttcaaattcatctactcagcctgagcatcattttctaactcacacaaaggcattttttagattagtaggagcactgacctgttcaccacccagcctatccatcctggtacaatcctgttgtaaccaagcaggtacccaggcctttttaatgcagcagagaaataggaagtgaggcaggagggaggcaaggtgatgtcttgtcttttctttgtcatgaaaaggtcaggaaagggacagatagagtgaaagaagattggaaaataagccagagaggctcggttgttcttcataacaaaaagaagttgggggtaagtaagagaaagagccaggaaagagagccagaaaagtcccaaaggaggggtgccctggggagccctcttgtgctttatagcatgagtggctcctgtgcagttgggagaaggaagaacatcagaggggagagaaaagggaattttaagaaatattgctaagcgttatagattagataccctttaatgtaaatattcaaattcctttttataaaaaaagatatattgaaatataattgaaatacaaaaaaattgtacatattaaacatatctgattttattagtctggacatatagccagacctatgaaatcaccacaatcaagatatgaatataactatcaccccccaaagtttcttcatgtcctttttaatcccaccttccatccctcccaccctgccatcccccacctcaggtaacactgatctgcttcccgtcagtagagagtagtttgcattttctacagttttatctaaatcagccacgcagtatgcattcttgtctggcttcttttattctgcattattctgggactcattcacgttgtgtaactgaatacttcattcctttttattgctaagtagtattgtagtatttctttgtatggatataccacagtaggcttattcattcatctatttatagacaattccaacttttgactattacaaataaagctactatgccattcacatacaaatctttacgtggaaatgctttcattcctcttgggcaaatacctaggggtggaattgctggatcacatgatggatgaaaccttaactttttaagaaattgcgaatttaggattttccaaagtagatgtagcattttatacccaccagctctccattaataaattggatttcatcaaaaatttaaacttctgctccaaaagacactcttaacaaagggaaaaagcaagccacaatatgagaggaaatatttgcaaagcatctgataaaacatgtggatctaaaatatgcaaggagaataacaactctattttccactaaggaatgaatgactgtacaaggaccacattctaattaggagcttctgaacccaaaggaatttcagataaggggaaatttaggcccaaagccaggagaaggggtgagtagggcttgatctctgcctctgaagggcagagggcgtggactattcttggctcttaggggacagctagagaaatgtgggtctcatggcgacaactctggactccattggaagaaccttctaacagtcagggctcccagagataaactagacaagtcaccaagagaggcagtgggtacccctcacaggaggggtgcaaatcaaagccaaggcttggagtggaccatattaaatccatttcttatcctgtgattcttagagtcctatctgtatcaggggaaggcaggtgggttctagaactttctaaatgtgtccctgtgggtttttccttctccagctacacacaaacttgggcctaataagaagtctatggcattaacccagcaggaatgcttaatgcttatatctgacctcaaaccaagactgtctccacagtgaacaaccccgtcctgtcccctgggcgtctccttagcaaatgccatcagtcaatggtgcagccatcttggagcccttgccatctataatcttctaccgccacccccccagctgattgttttctttgtatgtctccttcctggacattacttattctttacttttaaatatttgcttccgtaaaaaaacaaatgaatgcctcggacagatttataaagaacattcctggagaggcgggtggattaattattcagcatcctctccctttgtaactatttattgtctcatatgcatttatatggtacctatcactgcagatctcgctccatgctggagacataatttccagtgactgactacttgtctaagatatatatcgtattgcaatactattttatttctgactgtaagggcacgtgccactgttgggtaattgtgttcatgtttttaaatgtgaaaaataatcaaatataacttgaaagagattgtacagtaattcaaggggatattaaaccaccaggaagttactcggcaaataaataggcgtttgtggctgtcacgctgagcaatgaggagctggctggctgtgggggagggggagacagagagaggaagacaaagaggagagtgcagtgtgagtgcctggttgccaggttagttgtgttgggggaaaggagcttctaatggccaagaatagaagacctgaagttggctagtgcgtggctagtgcctgtaatcccagcactgtgggaggccaaggtggatgattcgcttgagcccaggagttcaagactagcctgggcaacatggaaaaaccccgtctctactaaaaatacaaaaagttagccaagtgtgatgacacatgcttatagtttcagctactcgggaggctgaggtgggaggatagcttgagcccaggaggcagaggttgcagtgagcccagattgaaccactgcactccagcctgggcaacagattgagaccctattaaaaaaaaaaaaaaaaaaggaaggaaggaaggaaggagaaaagaaaaaagaaaagaaaagaaaagaaaagaaaaatgacctgaagtcactggatttccttcgaggtagccagaaacagaggaaagggggcattgcccacttagggtaaaaagtagagcaccgaattgtggaaggctgcaggttttcatgtgtgcttgcccaagtgatgttccatgtcaggctctagggtccctgcagggacagagagggactaacatttacttacatgcctatagtatgtcaggcatatacttgtgcctttatatatatcagctctgtttttgtcattaaaacatccctgtagaaagataggcactgctgtcccattttacagatggggaaacccaagctctgagtggttcagcaaaccctgggtgcatacccccaccttgcccctgcaaaaccaacaaaaaaacgaaggccctgccttcctggagctgacatttaggttgattctgaaagtcagtaggcccagattttcactcttcatttttcttgtttggaatgagagagcacacagctgggtcgggggaaggagcgagggtctaggcctgcatccactcaccccaaaggaaaggagtaggggaccagtctgctggacatgcagacagcgattggagaaaagtcagcccagctatgaaccccattcctttcagtatgagccaagagggatggcatctgtcagagttgctggatttgggattttgcatcttgccaagtgtccatgaggaattggggaaactctccccctggctggactgaggcttcagcaagcattgttgctgcccagtggtgatcagctcagtgtccttggaaaagagcagaaagtggtatcacgaacatatcttctcctttgcttccttctcctcactcttcatcatcatcatcatcatcatcatcaaatatggatctgtgaggctacctctggggttgaaacttggttttgggcaaaatttgtgatgttctctctgcccaatccagcctcaggctacaaatgaatgtaaaaatctctaatttagtgccaagtaacagaaaacagctctacttatcttaagccaaaaagagggacttctcagaggcatactaatggaggatggcaagagggcctcacgtggaaccagggcctggagcggcacagcattcaggaagctcagtctccttctctctctctctctcatctctgcttgtttccctttacctgtagacatgctatcatttttccaatatccatggcagaatgtggccaccagtaactccaggtgtataacagaagcctggcctcccaggagagggtgacttgatgcccttagctccagccttccactcccaccctgggccaagcaactggtggccaggaggagctcatattgcaggaatattgaaattttcactaaaatcatttgaatcgaggaggacatttcctagaaaaaagggtgctagtctgacaagcccacagtggtccccttcatctggcaattcatcttctgcaaaggtcacaccatccttttcgctttccaacctctgcaccagtgcccaagtctgtcactccctcctctcattctgaaacatcctctgcactccattcaccagtgccaagccttgcccttcttcagggttcaactttgtcccaccttctctgagaaggctgccctggtccctgcaaccgctatgagctgccttttctgagctcttctgctgtggaggatccatgccattgacctaggcacccgttttccacatattgagcattgctgagcacctattctgtgccaggcactgtgcttcagggccatgggggatgctccaagcggtaaaatgcaaccaaagccccgaaggagctcacattctagtcatgtccacaaagaggtaataaatccataaattgtatgtactattctagtcacaataaaattgtgtcgtactgtaatgctgggtatccattttaaaacggggggcatcggctgaatctgggtcattacagtaggaaatgcatatatataatcatttactcatgaatattaatgtatttaatgagggtaaaagatattacttaaagcaaagtattcgttccagctactgttggatttgttcattactgtttcccatgcagatattacctgtgatttacctgcatatcaagcatctggaagtagctcaaatccacctgtgggtaaattaggttagccatttgttggcaaaaattacagtgttaactaatttccagggtatgcttgcagtcagtagtttcatacttaggtacatgacttgcattcacatcatctggttaatggtgtgaacagagattttctttatggtttttggaatacagtaagataatgttaagctaacgtaagtctgttaacagtacctggttctgaactgtatttataaggtgtatcataaaaccattactttggagtttgccaatcttaaattcagaacaattcaaaaatgagccagaatctagtttgcatcattaccacttataaaaataaggatctgtaagttggctggataaaatatattacaaaataatgacttaagtggctctggagccagcacaaaagataaaaattgggtatactcaaaattaccttcaaaatatcttaagtcattcttaaaatacatgtaaatatgccaactcaaaatacatccaacaaaactaatatttttcccaatttgttggaagaaatttctctttctttagttgtgcattagatgaggaagtcagagtgcattaatattcggggccctgttgtataaaaatgacagattttcaatgtatgctaatatgcaggtcacactcggcccagtgagatgcttgcctagaggaggcacgtggaagccaaggccaaggaaggcataattcactctggagaacttctttagctggcaaagctcagtttctccccggatcccattttgctctggttgaattcgcatgcaccaaaccaagaccaaagagtttatgatgtggttcccgccaccgttggccaatagcaatttctaggcccaccttcaccaaggcaggtcctagatgtgttgctaggcatttggagtttactgagatctgcaaagctgacttcttccccagtttcaggtggttcaggctgttcttgcctctccttggtgtgtcagagtagaggagaaatgactttcagtgctgggaccataaccctgtttccactccacttctgacttgcactgtgggctgagaattgacattctgcttggggaaattttgttcccccaaccgtagcaaagtttaattaccatgttcccgctgtggggggaaatcctattcaagaaaccagcctctctcaaatcaatcagtcatcttgctcattgaccaatggttcggccacccggcaagaaattagaaaaatctatgcataggagaaagctttccaacagccctggaaaggccttgggccccaaagggctagtatgaggttgaggtgggggagagcaagagaggacaaaacaggctgggtactgaccttcctcgtactccatggctcagaactctgacctcttgccaacctgccttccgcaagcagcgagagtagcacggctctgaggggcatggccagggaggatgtgacctctaagtgctccaagtcactgggaaccctgttctaataataggcaaagcttcagttgatggagtgcctatatgggcccagccctgtgaacagcttcctctcagttttcccagaatgaagctcagtgcacacactaagtgtgcaagaaacacacaagaattaattgcaattttaagtccttgtgacaatcccaggcctgcatctgcagggagttttatgaaggctgtttatagaattgcgggaggggttaagagaaagacaagagagtgtgaaatgccccagaactagtagcaggaagctactaccatccctgagcctgaaggacagaacccagagagacagacctgtgctgtaggtcagggccccccagtgtgagcctcagctgccgctgccagtccccaactcaacaggagagagctggacaataaagaccctgtgagcacccacaacttcccattggctgcatcctgttagaatctagaggtcatgggagcctgggagaggccacccatgaagatcagcttccaggggcagagagcagagtggacatggaggggcaaatggggaccgtccagcacagtcaccatctcatagacattttcctccacctcctacctcgagtagccagtagggttccagccggactgtggagcatcatcccaacaactgcatggctgcttcccactgtccctttaacagcgcacatgggagggagccacaggtcagcaaggcccttggctcccgctgtggccctcacccatgcccatccccacccgtccccatgctcagcacatcagcttcactctggctgaccatgtgcacagacatgactcagtaagtctgtcttttcttttcttttttctttctttctttttttttttttttttgagactgagcctcactctgttgcccaggctggagtgcagtggcatgatctcagctcactgcaacctccacctcccgggttcaagcaattctcctgcctcagcctcctgagtagctggaactacaggcatgagccaccatgcctggctaatttttgtatttttagtagagatggggtttcaccatgttggccacgctggtcttgaactcctgacctcaggtgatctgagcacctcgatctcccaaagtcctgggattacaggtgtgagtcaccatgcccagccaactcagtaagtcttttgaatgtgagcggaggcccccactcagcatttccaagacctgggaaatgagggtgaggagggggccaagagctctgatttcaagtcccagccctgccacccattccttagggcaggcacccaccaccgccttggctcaggcctcagtttccatctggaaggtgctggctgccttgatgggcctctatgggccctccagctctgtggctccatgtcaaatgcccctgaccacccttgagattaaccctttcccaaggatagacagcttcccccatcattctagatccctcacacttccccagctcctacggaaataacctatcccatcccctaagatctgcaactgttgagggtaagtttttggttaaaaagagtgagacagactttggcgctagtgcaaaacaagctgctgctgtaagagtgcatgtgtgtacctgcagactggtgcaatcagatgaccttcccaccaggctgcacagcactggatgtcctcacagtcactcagccactcagcaaactttgactgcacagcaacccatgccagacctgctgctggactccaggcatgttgagaaatgaatataatacccaggctatggcctcaaaaccttcaaaacccagggcaggacacagacagggacacagatgtgatacctgctgggatacagtcctcatgaggctctctaagaggtatctaagcagggacctagagggaggaggtattacctgagttgaacctaatggaaaggcattgcaggcagagggatcagtataagcaaatactcagaccaaaaacaatggcatgggggactccaccaaagaagtaaaagagaatagggtgctacatggtgtctcagtcccttttctgttgcttagaacactgaaactaggcaatttataaagaaaaggaatttatttcttatggttatggaggcttggaagtcccaggttgagggagcacatctggtgagcccttcttgctgggggcaggtactccctgcatagtcccaaagcagcataaggcatcatatggtgagggggctgagtgcactagctcaggtttctcctaaaaacccaccagtcccactccccaaataatccattaattcattcacccacaaatttattaacctcttaaaggtcctacctcgcaatactgccacattggagattgagtttcaacatgagtttttgaggggaaaagtattcaaactatagctcacagagatcgcttttcctagagatggcagatgaattttggaggtagagggagaggggcagatcacacagatctcatagtgtgtacaaacctgcccttcctgccggtggtgggcagctgaggaagggtctgtctcatgaaccattaaggctgcagagtctagcacagcatccaggccacagcaaaagcatgagacatacttggtgagtgagcaagagaatggaagaagaaatcaatggagccaaatgactccaccagatttgcatttgagacggtcactgcaagactgcaccagtcccaaattcccaagacagcaatgttttccacgatgggtctgaacatgtaaccattctcaggttcctgttgggggtttgggagcctagaaactgagacagcctcacagctgacagatcacgagcagccatctaagtcgacgtttccaaagtcatggggcctatggtttgtgagcttatttaggttgtccccgggcccagcatcaaaagcattgagacacgtactgagggactcttttcctagcctctcagtcctgactgctcaaggaccaagtggtacttcttgcctgcgttcctttaatgcttgcctaatatgagctagtcttctctgatcacttttttttttaatccaaagtaggtgggcattgtcccaagagcctttggaaagcagctgcctctcactaggacttcacagcatcattttgctttgctctctttgtggttaaaattaccttccattcgtggtgggtgtatgtcaggatccccacaagaaacagagggacacccaaattagggacatacttcagagggactaatgacaaaggcatgggtgggagtagaggggaatacaagggagacttcaagaatcttggcctttattataaatgcaatgtatgtccactatggaaaatttggggaaaaaagcaaactagaaagaagaaaaaccacattgcctgaattcctactgcatggagagaagcatcataaacaccttttggaggagtctcttcttcctttctccctttctccttctttgtatagagaggtctttcctgaggacttcccagaatcttgcagatccaaaatcttaagaatttgcagaggcagtgaggagttaacatgcacagctcagggaatattctgctttttatctggaaccaggctcggaacaagactccttgcttttctgtcctgtgttttcatcttctctcagaaccctaactttgagataagatctttgactattattaggcgggtgcaaaagtaattgtagtttttggcattatttttaatagaactgcttctgtgtcctcagatctccatcgttcatctcctgataagtccctgaaaatttcctggccccttggagctccttccaggagtagaatgatcacaagagctgccatgtattgcttattctggcctatttccttaggcacattagcccatctaaccgtttccatggcccacagaggtgggaggagcatgaagaaaaatgcaaggaaataagctcatctcaaggtatctctggctcccaaagaacataggacattaccaacttgaagttagcttctcaggaaactaagacccagctgcttttcaaatcctcaaaatattagtatgaattatagatatagttatagccttcagaacttctggcacagcccaaaactgttggctgtaaaaccatgtttcctaaattcaatcatgtttctcattgatttccattttgaaattggaagtctttgccctcaagatataataaaaaccataccaaagaaaatggaaaacttttcccccttaatatttaaaggagaatgatttttataaaaaaaaaaaaaaacattcatttgtctacttaaagtaaatcacagtgcagtgccagtctgggtttggagcataacactttttttgatttatggtttctgccaggagacacccagctaatgatatttgttcctatgtccttctctgactagctgggtggcagctaaagagctagggtgaggggagaccagaactccaggcctgtcccatgttcctgtctcacccatatgtggatttcaaccctgggcttagtgtctgcctctagcgacatgggaagagagggatgggtcctctccttcttcttgtcaaatggcccccagagtcccaccaaggtggagctccaggctcctgaccagcggggctccccaaccctcctgctgtgcccagtctatccctccttccacgcccagcagagctcagcagacttgcccttggccactcttgtgccttcactgctgtgtgtcctggacaggagccagcgtgggcttgctgatcacagagaaagctcacgtggcaaaagaaccagtgagattaacaagtcgaggtttgggatatatcttagagatggagccaatggggcctgcagaggatttccctggggactggaagggtgaggaaggagaatgctctcagatgacacctaggtggctgatgtgatagaatgggcattttctggaagatctgttcaggggcatttggtgagacagaaatcaagggtttggcttgggacctgatatgtttgatcaccctgtcagccacccaggtggagaggttgaggagatggctgatggcatgggtctggagctcaaaggagaggctgggtgaggcttgagttacacatttgagggcatccatgatgtgaagcacatgggggggcccacacaggggtctgtgtgttcccctgtggtgtgtgtggggacacgtgagtatgtgtttctgcgtgtacattgacatgcatgactcagaatgtcacatccatcacaatttcctgtctgaccttggctgaggtatgtctgagttttaatggcctgtaaaatgagggggtgatattagatggcatctgagacccttgccaactccacaattctaggagttggggaatcccaaagatgctgccatccctggtttgtttgggtgaacaggaacagagaagtcttaagaccacaagcagtgaggttagatgcgagttctgcacctcccctggggccttcagcagctgcattcttggcccagcagaggacttgcctgatctccaggatagcaaaggagctgaggccaaaaagacacatgggctactgctcacccagccccatattatacccttttcatcgctgcaattcaacataaaatcatatcattcacacctacccactcatgcattcattcagcacatgctcatttttgaaccggcaaatatatattagatatcgatgctgtgctgaatgccacagattgcaacaggaatcagacgccaacctgtcccggaggagctcacacatctttccaaaaccaatttctacttcttgggtcccctctcaatgtgtacaacatagagctttccttgcaaggctcgagcacaacgcagcagtcactccttgtctccaggcctggctgtagacacaatggaggctcctccttgccatctgcactccagtcaggggaggacaccaatccactaccaaatgaccatagccagcatttactgaatgtagacacactgtaggtagcagatttcaggcacccaatccaggtattgcaggaaggtagcttctatttttctataactgaacttgacttctttcttgggtcctcattctgctgggcatggatattttagttttagtttatttggggtaagctcagccagtgcaaagagtttgcagtctaggtagggtgttctttcccttctcttcccactagagaatttataaggtgccctggcactgttgagggaggagctacccgggggaggaatgaccctccgtcactgaaggctgtgctggaatcacatttcctctgtctccagccctgagtccaccaaagcatccatttcttccaggtttaaccacaaggcctttccaagactgcccaggtctccgctcatccttctccaggagatgctaatctctcggagaatctcctctccaatctgaggactggggcctttcctgccttcctgccaccaaacaggcctggagtggaggagagccagaagccttgccacctccccaggctacatccaggaagaggcaccaagcccacttgtcctgaatctcaaagcctacttaagagcttaggttctgttgtcacaagatcatgggcacaagccctcgcctggttctagagagagtggggtcagaaacactctcagcatttgagtctctttctcctcctctgtctatcctcctttccctctggcccagagaatcttcctccactccctggagaaaaacctatcccacacaccctcacatattcttcaagatctattggttaaggcatccaacttattgcttaagcatttcaaggactggactttggaaagccaagaatctgagttgcaaagtcttccttaaaactcaaaaactgggctcataggtgctcttctctttttcttggcatttgcctaaaagccaccctgaggacacctaggagaggccacctcaccacttcttgaaccaggcatgggggatggggaagaagacactggggaaaagctctgagtggtacttcagatcatcctgcctcaggtgttggttctgatcctctcaacgactcccaagggaatatgtcagctccattttgcagactgaaacccgagtctcggaatgacttgtccatggtcacacagttgctaaacatctgagccagagtgaaactctggggtatttgactttaaagtcccagcctttaaatcatcccacacttgcttattccaacttggacttgccggagtcccatagacagaggctactctcccaccgtgctgaagctggtgcatgccatgtttcagtaagagaaaggagggtgcctgggcttcgtctccacccaggtgcctctcccccagcagctgcaccaggccagctgagggggattttagcccgaatccagggtttctcctacagaagacaaggagtttgggcactgccagaattagaagaacagaaagaaaatgttctggatttctcatcaaatgcccctagcctgagaaatataactaaattcacccttaggtcatcttacaatctgtcctgccccagtgttccccactcagggaactgctccacccacatcctggtccccaaaccagaggcctgggagtcacccttgacatttcctcccctacacccctaatcaatcaaatcctgtttatcctgccctctgagagtctgcaccgaaatctctctcctctccttcccacctaccatggcccagcagctttaccatcatgtctcacggatctctgcaccgctcccaactggcctgtgcgttcactcctgccccctcctccagccctgtgtacactcccttccaccatcctttctatactctcctcaatcctatctgcaccctccttcaaccctgtctgtactctcctccaatcctgtccacacactccaaacaaagtcatatttccaagacaaatttgaccatgccactttctcccacagctctccaccacctccaggatcccatcctcagtgttagccagacactcccaaggccttgtgatctgccctgcctatgtctccagcctcatcctgcaactccccctacactctgtgttctggccatcaaaccaatgggctcctcttcctgcacccccatccactcttgcacatcctgcactctatgtctgaacagctcggtttctcttcttttcttctggcacatgtctgctctacctgcaggtcatcttagatgtcacttctcctaggaaggctttcctaacctccaaaacaggctcagttcccctcttcaattctcactgagcctcctccctagcatttccctctctgcattataattcctccctgtgcaagtgctcatctccccactgcactataagatctaggagggtagagtctgggtcccattcgtttctgtaccctcagtatttagtagagatggggtttcaccatgttgcccaggctggtctcgaactccagagctcaggcaatccacccgcttcagcctttcaaagtgctaggattacaggcatgagccaccactcccggccctctgcattcttctatttaaaactatttattgagatctactattggctagatttcggggatgaaaaaggcagacaaggcgccctgccctcaaggggttttcagtttagtggggagcaaagcaaaaagacaaacaaacagttaaatataacatctagtagtgataaatactccaaagaaaactaaagcaggggccagagagcatgggggcattgatgttttagacaaggtggtaaagggaggtctctctacagaggtggtatttcagcagcagcccgagcactcagtaggtccatggtaaaatttagttgactcccgaactaactgagtgtctcactcagtgaaagcctctaatccattttgctagaagtctttccctgtagctcattttgttccaagtcacaagcatcaggcttggaagacctgtgtgggagagtaattaacctaatacacagcgcggggaatggaagcccgaacccccagaagccttttctgcaaaaggaccagggcttgggtaataaaatggggctttcattctcattaatggggcaattgatttaaagaacagacccagtggcttattgatcagtgttaatcattagaaaatgctgacttaatgaatctaactgccatgaggcccctgtgggatttgggaaggccagttagatacaataactttgtccccttccagtccagcagacagatttatttacagaaatctggattttttttttctggaaaaaaagtcaaagagtcactgggggttaagccatttctccagctgatctgagagatcatcccaagcctttgtaatacgcctgtctctcctgccatgctctgttcctatctagcttttcaaaacaaactcttcattttagaatagttttaaattatagttagagaaaaacttcaaagatagtaagagagttcccatatcctgcacacctggtgagccccattggtaacagcttaggttaacactgtcaccactaatggacaaatgttgcaatattattatttgctcaagtccatacttaactcagacttccttagtttttacctgaagtcctttttctagttcaggatcccacattccatttcgtaggcatgtctccttagactcttcttggctgtgacagtttcttaggcttccctctgttttgataaccttgacaatattaaggagatattgggcagatgactgtagaatgtccctcaactgggtcttatctgaagtttttctgatgattgcactggggtttggggaggaagagcacagaggtaaagtaccattcacatcacatcatttgaagagtgcatgttatcaacacgacctatcactgctgatggtgacctcgatcacctggctaagattgtgtttgtcaggtttctctgctgtgaagtcattttcctccctcccctcttacacactgggctctttggaaggaagtcactgtgtgcaactcacactgaaggagtgggaagttagagatcctccttgagcgtgggccatcttcatgaattattgggaattattctgcataagagatttgtttatattaatatgagctcatggatatttatgttgacactttgggttataatccaatagtattttacttcttttcttgctcaaattactccacctttgggtactggggctcttgcagttggctcctatgtccccgtcattgaggggtttgggttttgtgtgtgtttgcgtgtgtgtgtgtttgagcacttctttactgttggcaccaaaagatgcttaggcttgctttgagcatctcctgccctggccctggagccactccaaggaacctccaagaacgcctgattccttttattactggctcctattataattttcataatgggctgtcattttgttttgtctggttttgtttataattataagggtaagtcagctcattgcataaaatatagcaaagatataaaagaataagaatgaaaataagtatcccaaataatccaagcagcaaagaaatccagcgttaacattttggggtattttcatctggtctttttgctagttgctggctcttaagaagtctgtgctttcattcttgatctctgccagaccaagggatatcatgggccctggtttacctccctgtcccagcatctgtggttggagcagcttccatttggccatcctcaggtggtctgctcgctgggcccctgcccacttctccctccagcagaccgcaggccaagaggccaggagccagggtgtgtcctccagcagactctgaggaagtgaatacatcactgttctgtgacttccaacgtgatagttggcctcattttcctcttctttacgaagtaaatgcgataatatatacaaagtgctcagagaaaggcctggtaagaaacaggtattttaaaaagtaaaaactgtcggctgggcgtggtggctcacgcctataatcccaacactttgagaggccgaggtgggcggatcacgaggtcaggagtttgaaaccggcctgaccaatgttggagaaaccccttctctattaaaaatataaaataagctgggcggggtggcaggcacctgtaatcccagctacccgggaggctgaggcaggagaattgcttgaacctgggaggcagaagttgcagtgagccaagatcgtgccattgcactccagcctgagcaacaagagtgaaactccgtctcaaaaaaaaaaaaaagtaaaaactgtcattattataaccataattactattagcaatctgaagaaacacatatctaatgatagaagttcaggcatagtgtggcaggcaggcccctgggagggatgaatttgcacaagcaaactgccttctccatggagacctaatgaaattcatccggtccttcttgagagtttgactgagttgggaactgtgtctccaccagaccagcaaatggaagagaagtttcctggggctctagctgaagagtgtgtactgaggggcagtattgcattgtggttgagaacatgggctctagagccaggctgctcaggttcaatgcccagctccatcacttacctgctgggcagcagcctgagttatttaaacctcactaggcacaatgtaaggataacaatattgactatcccataaggttgctggggatgccaaataagttcacaaatggaagaactttacacagtacctagcacagagtaagcagccaattaatattactcgagttactgtttttattacttcatcattcgggactcttccggttgcaagtacaaggaaagccaacccagaatcacttaaacaaaagggaatttattggctcatgtaactgaacttcaacattttacagaatctcattggctccaatgggctcatacgtccatccccaaaccaatcacagtgactgagggattatccaaggatcacactggccactttcacaggttttatccctaaaggaaatcacaggtaatagatgtggggctgcagaaatgcaacatgcacttttccttgaaactgcatcccttttccctgaagatgaagcttgaaagaactctaagaggttaagcatggagctgatgggcaagccacaggcagaaagagtagctgtgcagccaggctcctggccagggagggcagataaggaggggaggcaaagtttggtaaacaggaagctaatctatgggcaagaatcattttcttcagcatcctgacctctcctaaaatgttctccactggtccctgctaggacaaaggaattaccaccagactagagtcaggagtcctgggctggttctgctgtatgacacaggacaggtggcttgcctggtctgggccacagcctcctcccctgttgatgagcatgttggttgttccagcaccatgtcagccctagaaatctctgaattcttgaccagatcagtaattgctctcttgcgtttacttttccttcaaataaagagattggcatacaggggaggagcccagtacagacggcatgcttggctcaggttccagaacccagaaaccagacaagagttgggaaaccatgatggtggaggagggtgtgccactccttactagtgcctaatctcttcgagacactaatgtttcagtattatccacagattctgatgccaggcagcccagatgactggggtcagttattagcatgcttcctggaggtggttcccaggtgcaggctacctgcagtctggctggatgggccctgcaccacacttgcttctgggaagctggttttggggttgccacaatctctgaaagaatcactaggccaccctctgagtgggtccttctgtaggaattatggataaaattgttccactagtcttaccttcttggggaacccttcctggattcccaggctgggctgggtgtccctgcagcctagccccacagccctcctgcttctctttctcatcacagtcttgttatctctaccaactgtaggcctgccccactgatggtgtgaataaagggactgggtctctctagcacctagcatagatctgatacatagtgggtgatctctattgaatgaacgatgaatgaatgaatgaatgaatacatttagataattcagattactctttctagctcagcagtgtaaagcaggaagacatgctgtcaatatgatttagggcaagttttcaaatctctctggacctcagttttacctcttgaaaaataaatataataatttgtccttacttcatgagactattttgaagattaaatgagataatgtatacactactactcactgtccttacttgaatattcctaggtccttggtgctacattaggctacatagaatgtatttaaagtaatagagtggtatttaataaatattcattttctttccccagaactaccttaaattaatttgttgaaaggacagatggatggatggttgatggaagtagcaggcttccagcagcaggggatggagtgagtgtgtggataccgctggatcagcagaaggttataccattttagagtaactatctcggacttcggagagttcctgggtatgaaggtttggctttaattaaagtctcagcacagtgttaaatgccattttattttaggtcataattaacactaatgagatgagtggattacaaagagcacacattttgagaaagtgaaaaacaacatctgagcttggtggtttccattttcgcttttccccctcccatgctctgttcaattaaaagttttgagaaaatattacaaccatactccttgtctttgtggtaatgaagcatattaatttgaatgtgatgaatacaatattccactgacttttttattcccttatctacaaaagtttaaaataatggaccaattaaaccaggagagaagaatgcagggtttgcctggggatccaattcagcaaccagagaactgaaagaacaaaattttttgacggagtctgggccagacttcatcccttacctatagctgacaaacagtaagtcaaattgggcagatgtggaccagcgcagaacacatactatattgaggatcgaaaggccaggttccagaccgtcctctaatattttcttagtgaatatttgttggatgaatgcatggatgggtggatgaatagatggatggatggacagatggacggagagagagatggatgaatggattgttggatgaagttgaaagatgaaggtagatgacctcccatggtctgattcttcctaaggtagcaaattaagcctaggatgggctgacctaacccttccaaggacttagaagtcagggcaagaacttacagggaagggttcagttctctgacctcactaccctagaggcataaactataaattatagagttggcctgagctcagtttccctgggagctctgctctaaagcagagccccttgaccctgcaccaatttggttaacccgagtaaggctgagcttcccccagcaggagctcctgctttggaagagaacatcctgggccaggcgcagtggctcacgcctgtaatcccagcactttgggaggctgaagcgggtggaccgcctgagctcaggagttcaagaccaccctgggcaacatggtgaaaccccatctctactaaaatacaaaaatttagccaggtgtggtgatgcagcacacctgcagtcccagctactcaggagactgaggcaggagaattgcttgagcctgggaggtggaggttgcagtgagctgagatcacaccactgcactccagcctgggcgacagagtgagactctgtctcaaaaaacaaaaaaaaaaataaaaaaaaaagaagaggacatctggagcaggcctgtgaacctgacacatggtccaggtgtctccctgaggacttctggaagtctccccacctctctgtggtcctttaggcattaacaccaccttgtcactgtgtcttctgaggcagtctggaagttcataccccacaatctctgtgtaccttgtcccccattctgttctctgcattgcagatggtttaaaacacacacacatacacgcgcaaaatgttgttccttttcttaaaacccattgtggccaggctagacaaatccttaacacggtctacaatattctgcatggcatggcccctgggtgcctcccaacctgatctgtcacacaccacctccacctttgcctgttccctgggccctagcactaacctttggttcattcctagacaccttttcagcacttaggcccccacagccctcagaacctttacacttgctgtctcttttgctttaaatgttcttgccccacctaccacctagttaatgccttttcctccttcagctcttagttgaagcatcacttcctcaaggagggcagccctgatgaaactcattatgcaaactccagcctgggttgggccttatctttatgctgtcatggccctgagtattcttcctttatggcaccaatcacggcttatatgatatacttatgctattatttgagttatgtctgtctcccccagtatgccactagtattagaatcattgatttttaatcattgtatccctagtgcttagcacagagcctggctcataatagatgcttaataaatatttgttgaataaatgaatgagtgaatgaataaatgcctcattcaagagctttggctctttctgtactactacattacttctattttttagctcttaattctcaaagcactttctttgtgctgggcttatgctgggagcttagacagtaaagcttagatggtaaactacagttgctctcaagcagttcacaatgtaacaaaaaagagacacaaatacacagtgacaatacagtgtgtcgagtgctacaatagatggaggggtgcagttttatggatgtggagaagaaatccttctattcctcactggaggcttcactaaggagatattccctaagctgcttctggaaggaaaaggtattggccaagaaaataagggtggaggcagaatttcaggtgaaaggaccagcatatgcaaaggctcagagggcagagcctggcactggaaacaaaatgcaagtcacttcgtggactgagacctggatgaggacatggggctatgagagatgaggctggggagggagacaggggccagatcacagaggcctttcaatgacagcaacatatggcagctgcagagacagcatggaagggactggcatggtgagacctgtgatatggagaactccctctcgaaggggttcagaaaagagatgtccatatttcaagtgaaggacttcctcccctggagaaactgaggctctgccccagggctgtccatcagactccttcccagaatccaaacgcttccaaaggatgttcagtgtggctgaccttgcttattcattgtggggagaattaatttcagggtggagaattttaaaaaaatataagattaagcagtgtaatcagctgctgctgagagttgcaaatgcaataaataataatagcattgagagctgtttttaataactcaccagtgtaatttagcctcggcttcttagagcatatttaaaatatgtcatagtgtgtctaatggcaaatgcctcattgccagcctctgaagacaaatgtcttcccaggagggaggggggcagaaaatagaggagaaattggaggatttgattgcaaacagggtgtaggaaggcaagcattgttcattctgacaccactaattcaaaatctgtgatctttgcctaggcaataggttttagttggtttgtcttcaagggtgaaacagatggatagcaataatatggtaaaggagatatttataatttgtaagagaagaggttgttttcagaatctatagaatcaccattttcatgcagtccatattctaattacagatcatcctggactatctattatagcaggtccccaggcaactgatatcttgacaacatttgttttacttagttgagttactaaatattcatgataccatgaaaatgtgttatttaaaagtgttcgatgaattctgagttttagtaattcatatgtgctgtccccgcccaaccccgattagtctaaactggtgagatggggctaggagtcctcccctcttgggtaacagacttgacacagttaaagtgagacaaactttggagtcagacagacctgagttcaaattctagttctaccacttactagctgtgaccttttgcagcttaaacactgaggctctattcccgatctgttaagtgagagtggtgatgatgacgaccatgacagctaatatttatggatcgcctattgtgttatctccaacacaacgatacagtgacgtaggtctaccatggttcctgtttcacagatgaggaaacttgaagcttagcgagctcaagtaactttcctgaggcacagggctagtgaataaccactctgggacctagtatctgttctagctggtttcaaagcctatgctgttaagtgggctctgatactatcttgtacagttgggggaagatttgagaagacatgtgtaaggtatagttcctggtatgtaattaggactttataaatatctcttatatggaaggactgaatgtatcttcctgggctgtgtcctcgcagggagatataacatctatgtcactctcaacgctttattaatgtccctgtcactctatacccttgtccaagttactccacaccctccaaagcctcaagtttttaatctgtaaaatggtggtgggcggaggtggggagtgagcgctcttacacatactactaggttgggggtaaattagtaaaacaactttgggaaacaatttggcaagacttagtaaaaggtgcatagatcctgtgacacagcagttttattcctgggataaatgctaaagcaggttgtctccatctctgcactactgacatcctgggacagatatttcattgtgatgggggctgttctgggcattgtaggggatttagcagcatacctggcaatttattcccaagaggaaagcaatgaggaaggaaggaaggaaggaaggaaggaaggaaggaaggaaggaaggaaggaagggagggagggagggagggagggagggaaggagggaaatatttaatagttaagttacatccacaggtttgattataaatgtgtgtattgaattggaatttctgttgaaattctgatcccttctagacaaagaaggtaaaaattgaaacatgtcaatggatatctaaatatcattactcactggctttatttgcaaatggctttccattgacaacagttacattttgttcaaagcaacaaatgattggcgctgacaatccacaggaacatggtgcagtcattaatgaatgtgctcattattcctccctgccgggaggcatcgactcccgttctccagcctgttttaagcagacagacctacatctgcacctgtcagcttggaaccctagtaggggagggggatgctgatgtgatggagaatgaagaatgggccctgcaggctgacattttgggagagtaggttctgaaatttatcccaaaggacatggaatcctggaagcagggttcaagatcctcccaaaattgatctcccaggatgcttggaatgattgttccgagggttttgtaaaatgccaggggaaaaccaggaagcttctctccagttgtcttgcctccttcctctccagtctccatggagctgactttgagaattaactcctgagggacagagaccctgggatggagagccagccctgctggattccacaaggtgctgcttaaagcacaacacctcttcccaatgacaggttctgaaagaaggccttgtagctagatgcacagagggttttgttttgtttttttttttttaacctttcagcatctgtctaaaattgctctgggctgggtacagtggctcccacctgtaatcccaacactttgagagctgaggcaggaggatcgcttgagcccaggcgttctagaccagcctgggcaatatagtgagatctctatgtctagaatgttttttaattagctgggcttgctgcctgcacctgtaattccagctacttgggaggctaaggtggggggatcactcgagcccagggggctgaggctgcagtgaaccatgattacaccactgaactccagcctgggcaacagagtgagaccctgtctcaaaaaatatatatatataaataaataaataaaaataaatggccaggtgcagtagttcatgcctgtaatcctggcactttgggaggccaaggcaggcggatcacgaggtcaggagatcaagaccaccctggccaacacggtgaaaccctgtctctcctaaaaaatacaaaaatattagccgggcatggtggcacgcacctgtagtcccagctactcaggaggctgaggcaggggaatcacttgaacccaggaggcggaggttgcagtgagccgagattgtgccactgcactccagcctggcaacagagcaagcccccatctctaaaataaaataaattgctctgtaagttgacaccactaaaaacatcattagtagttgtaataattaagataaaggagaaaactgtgcagagcccagcacagtgcctgctccatggaaaatcctaatgacatttagtttccctctctttgcccccattttcttatctataaaacagaaataatgctgtatcctaactcaaaagttgattatggagagtggcatagtattgtttcaacaaatatttattgagaaactgcaacacgcaaatagatgtaaaaggttgaacagaactttgcaaattaaaaatcctaaaggacattttagaccttatgaacttcctaataggtaagactttttaatctatctgcagtgtccaacaggtgcaagagcttgggcggactgtgaatatctaagaaaagagagagagcagaaaggagggaggaagatgaaagaaggaagggaggaagatgaaagaaggaagggaggaagaagggagggagggagcgagggaggcgggggagggagagaagggggaggtagggagggaaagaaggaaggaaaggaaaggaaaggaaaggaaaggaaaggaaaggaaaggaaaggattacaggtgggagggagggaggaagggagatatcattattattgtgcaattgttatcattatataactaatttaaacaaacccatcctgtgcccacaaaagggcaccaagataaaggctaagataaagaacacacgaatcattttcccattttcgtcagtgatgggaatggtaatgattttctctctgaaccataaccatcttgcagttaaataattgctttctgatagaatcaggagctctgagatggtgctctgaggagttctttcatttctttcgcaccttttaaagaaaagaaaacttcaagtgcaattattggcattattttaataccgactgcagcagaacattctggaaaatgaggcccctatcaaattagtttttccaaatgaggtttagacagtaccttaccaggagaaccactcagaaagcccccatggcagcagcaagccctgttgagtcaagggcacatggatgtcacactgcacatgtgttttcagataactaagtgaactgctccgatcttgtgggtcattgcaccacggggcctctccatttacttcaggttacacagcaacaagcaagctgagagcagcagaagtagctagctaaaattgcatttgattttgtgactgctagaggccaatactcaagtgaagtttaagcaaaaacaaatcatactcagctgaaaacatttgcctggaagaaagatctgtggctggagaattggagttcatgcacccagcaatttccagaggaagtctgattcccctacctgaagtaacactccttcctctccccagatccagatctccagactatacgtactcaatatatgacttgtccatggggcccagctgagcattattgcctctagcttatggttaataataacagtaataattatactaatattattctttctatgcataattactaattcatcttaatctcacaactctatgaagtacatactgtgaatgtctctgttttacaggtgagaaaacttaggcacagagaagttaagtaactcatcatagtcacagagctaagtaggaggcagagttaagagtcaatgtaggcttctgacccagagattgtgctctggacctctgtgccacactcccacttactgggtatcagggactgtgctgagcagtttatggcatcatctcattttgttattgtaacaaccctatgctatgggtatcagtattattcccaggtaaggaaactggctccttttggagcttgagtgacttatcgtggtcacacatctagtaagtggcagagataaaattgaaacccagagctaaaattgtttggcaaaaacttggcatttgtgattgtgaccatcttggtttccaagacgcctgggggactctgcagaccatggccagtattcatttgtcaagatgcaaggacctaaactggaatccagtcttttatgatgtctggatcataacaaaagtcaggtatctgctccatgaggccagctaatccccccacaaccccacatccccctgacacacatcatcctcacctagagaaaccttttcacaaataatcaaacctttgtttctttaaggcaaatggacctaaggggaaaaaaaaatgcctgtcagtattgataaggaattgaagaggaccaacaatgtgaagattcttggccaaaaaaataaaatagtaatttgggacaaatttagtaagagaaatatcagaatctatgcaggctcacatctccaatacaaacatattcaccttacactctatatggaaatagtaaagagcaatttgtgaaatagattccatgagtgccccaattagggcaaacatttctcatcaaatgaaggatggaacttcaataaagatttcaaagctggttacatgtagagagatttgtgaagaaaccttgtagctctgatggaactgggatgtgagaagaaggcaggttttctgataaacaattcctgtatctttcacaaatgccaaatcacagactcagcttgggacatatgaggacagcacagactttggaggcaggtagattttgggttgtcacgcagacacccactactatgagacctggatttccttctgacgttattggggataagaagtggcacctcaccatttctaggaaatagtaggtaagtctttctggttgccactgaggtgactcacctgagacacagttgctcctaaagttcaaggttaggagacaatccagaaggggagctgtctgtgaagtcagaattcttggaagaatgtaagtctttacacagtaacagcaaagcagacagtgggaaccactactctgccttcttgcatcattctttcctagaaataccagaaagcagtgagggattaagtctaattcctggcacctgaccttatatctaacagatgctcagtattacctgttgatgggacctcactgggaatgttttgtgtgcagtacaaaagggcaatagatgaaactttgggacgggagcccaggaaaatggctgagaggagagcttatgcctagcttatgcatgagcttgcaaaaagggagaatacacgggagggaagatcagcaacagcatgagttttataaggcagagagttgttgggaaggaagcagcagggagaggggaaggagtaagtagaaacctagaagagatacagctaagataagccaagagaacaaagtattgacttaccagaaacatggaagtcttcctgcttctaatttagttccgcatatctggatatgtgaatgcctaaaatcccattaagcccagtgggttaattattacacttgctagggccccagaggagaggaaacacagtaagtcagaaaaacctctgggcaggtgaatttctcaggttttcttctgggcagatgggatctggaatggtagcgtggcatcctggtaattcagagacagtggggagggtgaagaaacactgatgtgtagcatttctgtggtgtcaacaccctaccatggctgatttcaagctgacaaaggtttagcaactgccttgctgatttcctgaaaatttaacaattagttttcatgagatgcagtgggctgaccccaggacatcactgcctacacgccaatgagaatggagattgacacaaagaacagagtggagagacacagagcagggaagacaagattttcccgagtctcaatccaatatgtagactatgtctcccttttcacaaagaaggaaggggaggagagaccagcattcacattcagttattgttgttttaaatccattacgcacatacataggagaaaatttcagcaacagtcaccctctgaacccagttcctcagttctctccagaggcaactaaaatgctcaattattagtgtatccttttggaaatattttatgtatatgacagtgtgtgtgtgtgtgtgtgtgtgtgtgtgtgtgtgttcctttccaatattaaaataatattaacattggtaatagtggtactaaacaacttagggtgttttttttttcatttaatagtatatttttagtatctttccaggaaaagatacatggatgtgccacattatttttaatggctcacatggtactccttttatgtatgcactataatttatggaaccagttttctcaccgatgagcatgtaagttctttcagtcttttactgttataaacgaatgatgcaatgaatatccttgtacatatatatttgtgcgcatatgtaggtatccttacaagtggaatttctgaataaatggatatatacaatttatttatgaatttaccttcctacaagtgattcaagagagtgtctttgctccacagtgttgtcaatatagtgtattctcaaaatctgacaccaatatgtgtgaagtgcctgctctgttcccacactttacacaggttctcttatttgcgttaagtttatttaagaagaggaaactgggcctcatggagatctaggaacttgcccaaggacaggtctctgtgactctaagagtgcaatcttcccttttccccatgtcaagcacctttccccaccaggctcactgctgacaatccagtgtacgaagaagggaaattacccccacagagcccaaaagtttaggacatgccgacagcatcactcttttgcctcctcattctctctttcatttccagaacatttgctcactcagtgctgcccagtgatacttagccagcctgattacccatctaataatttctgatactaatataaaaccttcccaaagacaaatataactgagacgcactccagcttaccatagctttcctggtggtacagtttccagggacatttcactgtgtcaaagcagggaccacatatgttccagaccagcttgttgggtttttcactgggaagtgaagacaaattgttgtccctttgaaaaagcatctttcatctctccatctatctgcgatctaaagcaatggggctctttctgtatgtctttcaaatggtctacactgacacacgttttctctgagctgccgagagaatatgccatgagatgttgccagtgatggttacactcagctagcagaagattagggactggttaaacctttggagaaattgccttgggaaaagaggaaataaaagcaaatattactatgaaacatagagattaccaggtaggaggaggagagaggtggagggaggggtaggagtggaaggaagggagggaggcagaaagaggaaggcagactggtggaaaataaaccgtgcactttagaacagcaggaagggaggcttggaagcctggttttctggctttgaatgaccgcctagcgcttgccggtgcgccagggtgctgtgaggatgtgggcagagggcgagtccgaagggctccagacactgggaatagtggtggtcgtgtgctcctccctgaaacttttgcactacctcggactgattgacttgtcagacggtaagcgaaccctggagcttccccgttttctgtgaatgtgtttttgtggcttcggttgctgtgacagtcgtttcgaaaatgcacggaaatgagggcggagacccgagagatttgaaaaagccgggctgaaacagcgtggtattggtccccgcctccccagtcgcgccccagtgctgcgctgtccgtcgtgctgaaatgtggtgcgcctggggagtgcgggagccaggaagttagggtctcctgctccggccctatgagcatgtgagtcttgatggattattagctatgggtgaggccagcacaacacatcacaattctctctgaagctgtctggtaactacgtatattgttgatggaagccagtgacttttaaaagccattatgttgattaacttttttaaagaagtttaggagattatatggaggtaaaaacctttgtaaaatgctaatcacagtgtctgacaattagaacacatttaataaatgtcagtttctttgctcaacccttataagaacccttattccaaagccacctcctcagctctgacttcagctccattccttagtgagaatggggttataaatccaggttaacccgattgtttaggattagaaagtgatttggtttccaacgttgaaggagttcaagaaacaaagagttttatttttcctccttatgagatattgttccaaatagaacacagtttgtctagatgatttttgtcacttaaaattaggctccaggaaagattccaaatttcatgagcaattgggctcataaaacaagatcaaactccaatagtgtatatccaaagtatgtataatgtgtattcggtgtatattcttccaccactgcatggtgtagacagaatttctcttccaaggggcaccacatgacaaaaccgtacataataatgaaatgcatttgtagacaaaggactagctaaaataccaactgaaagtgggaagaccagaaactgaagtgtaagatgaggtaagccctggagtaagagtcaagaaatccactttctatccataatctgtctcggtttaatgttggtcaagtcattttttaaaaaattctaggtcttggtttccttatgatgactttagatctctgttccttggaattctagagtgatccaaaggtttctttgaattcagttttgtgggttgagacgggcagccagactgtgagtccctcagctctgcttcaaccagaacagctccactttactgttcagcatgttagccctgtatgtaaggatgttttttagctttagctaaaatttagtgactctatgaccctaaggccctgcttccctgagattttgaaagctgaagcacattcggaaaactttttcttccttaaaaatcacctgaaatctgacaatctggaagactagttctgtctgctccagcccttggtcccttagatgtgcttttctgaagatccaaactcaacctgccagtcaatataccaactgagcagagcccctgttctccaccagatttcaagagaacatgttccattcctgttcagagcttcagagcagcttccgctaagattgcacattaatgcaacagcgtcctattttctttgtttctttttttttttttttttttttttttgatgagacagggtttcaccatgttggccaggctggtctcaaactcctgacctcaggtcatccacctgccttggcctcccaaagtgctgggattacaggcgtgagccaccgcatctggccaagcttcctactttcttataaggctaaagttgcagtagaaatattcccctgctcttcctttccatatcataagtatccatcttccttcccctgctttaacttctcatgattgcagtttttgttttattacaataaaggatatcaatcattcatctaatgttatagcaatgaggggatttaaggtgaaaggtagagaacatatgttgagaactgtttctggaaactctaggtgaagaaaaagaagggaattaacatttattcaacacctacaatgtgccaggtacagtgctaagtgcctttatatacatgagttaatataaacctcaaaataatgctctaaggaaaacattttaaataatgctgaagttaaatatcatgattccttttatataaggaagaagacagatttagagaagttaaataaaatttccaaaaatgcagcaatagcaaggtggaggtatttgtctctaaaatttcaccctctgttctgtacaccaagtacctcagcaagtaatccagttccagatgggatctgcagtctgccattaagtctttaccacacataggctcttatgctagagcccttaccatatggtccaaaatgccatttttaatgtgtatttgatatggagactctgttcacaatttgagtactaaagagagaataccacctcctagtagatacaccaggaccaatgtaatgctgtcattctaaggagagcagtggaacatctccaaagaacccatctgtagtcttccttcggcccttgatcttattcctattttatttttaaggtttttttttttttcttcgagactaaatctcactctatcacccaagctggagtgcagtggcatgatatcagttcattgcaacctctgcctcccggactcaagcgattctcctcactcagcatcccaagtatctgggactacaggcatacaccactatgcccagctagtgtatgtgtgtgtgtgtgtgtgtgtgtgtgtgtgtgtgtgtgtgttagtagagacagggtttcaccatgttgcccagggtggtcttgaactccagagctcaggcgatccacctgccgaggcctcccaaagtgctgggattacaggcatgagccacagcgcctggccaatcttttagggataattttagaacagtatacagatattgagccaagagtcaaaagagctgggttgcaattctggttgtgccatttatcagttgtgtgaggtgggacaagtctctttttctccctagctttctctttcctcatttataaaataaagaaatgagaatgatagttgtattaatttctgaggactgccagaacaaattactacaaactgggtggcttaaaacaacaaacatttattctcacatagttcaggaggctagcagtttgaaatcaagttcttgacaaactcccctagagtctaaagtctctagagaaggattcctccttgcctcttccagcttttggtagctccagtgttctttggcttgtggcagcatcactccaatctcagcctctagtttgtggtaatgtattatgacagtcttaggaaaataatacatcagtatttggaaatgtttcttcatttgccacaatatgatatcaaataaaatacatccacttaaaagttcaggtatggatacacccattgatttggaatgctagtgaatgtaaaggcttaggtcaacttctctctgcagttccaaggaggatgagaaatagcagccttgacctcccaccagcgggagtttccctccttcatccctggtcactggccacacaaggacctggcatctcccagtaaatgtgttcctctgcaacctgagccacaaacctctctctcttttatctctttcctctttctaccttcatatttggttggctatttttagttcttctgcagatatagttacactttaaatgacacacagcctttaattacttacatgttgacttgaagcaatgtctgttgctcaccttcttggaaatatcagaagacaagaacacttttacttcctcctccttctcccatccttctctctgtctacttaatctgtttatcatattctcatttttacaccatcaaggtttataatgctcccagaacatacctccttcaaggtaaatgggaatggtaacctttggcctctccttgcccataaggacaacccagtctcctgctctgcgtgggttcccaatttggccctaagacttttctgtttgtatgatcagcaaaaggacatcaaatactttccatcctccaatgagcagaacacattctgtggtcagaagccttctcattacttctgatctcaaagggacatccagagttgcccaaacccaggccaaccacccttccatttagccacagcctgaagatcccaactatgatcaacaaataagactgactccagatcccactctgccaactgcctacctaatacccagactcttgcagctgagagagtctcttctaaaatccagcccaaaaggcacactagatgtgaggaccagaatatcttgtattttgtagtctattatagcaagcataataaacttatttgtttgagaccgagtctcactctgtcgcccaggctgaagtacagtggcacgatctcagctcactgaaacctctgcctcccgggtttaagcgattctactgcctcagcctcctgagtagctgggattacaggcatgtgccaccgtgcctggctaatttttgtatttttagttgagacatggcttccccatgttgaccaggctagcctcgaactcctgacctcaggtgatccacccacctcggcctcccaaagtgctgggattacaggtgtgagccactgcccagccgataaactttaaaattactttttctattccatatcatagattctgggaggaaacaaggcccaatttgagtaaaagcaactgcatttagctggcttgaacttcttcagagaaagaacaacataaaatattcagctcatctgattttttaatgacatttcctttttatttatattcaattacacaagtaatacatgaacagattctcccttttttaaaccatcccttattctacagatcaggtgaaagtacttgttgctggcctgtacttcccatccccacttttgtccccaggacaaagtactatcaggatactagcattcagagtgagcagattcctagtactgacataaggaggatcaccatctaatttttaaattttaaaaaatgaacacaaagtctattagaggaatgaaatgaacctgctttgtaggtacataatatttctctctccagagagaaaggaggagagcacacataagataggaagatgagagctacaataaatgagagaagagagaaactgtcagaaatagcagggcagaaagagggaaagaggtgagaatgagagagagggggagggaggaacagaggaagatgcgaacaaggagagtcactcagttctgaggcaagcacttgattctccgtggttcatttgggtatccaagtaagttatttcctataatcattggcctttaggagtctgcttagctaattaacagtttgcaaattgccaattgttttttgtcccgcattctccagagactttacactgcaaaggcagaccacagcagcccaccttacacttgagttgtggccaaagcaccatccccaccagacaaagccagccccacagctgaccccggcctgtgagtgtctgaaaactggctgtaaagaacattctgtctagttacttcctcagtaaactctggggctgggcactggaggttttctgaaaggaagtgtttggtgtctcacacagccatgtgcttagtatattccatgcagcactccactgagccagtgcccttgaaatgagcaagcactgcagccatcctcctttatttccctcaaggcaatatccaaggattaaaaagtcagagccgtctgcagattcctcctctctaccttgccctgcactttttgtgcccttcctcttccccctctccagccccaaacctctctcctgatccacggtactcctcctgggatgtccactggggctgatcctcccccattctccccctgagttccctgctgttaatctgtctccagcaaaattaacctagcctatgtcccatgccctctggactctggctgctcgtcaatcactcttaaaaatccggtttctccttaggcaatcattttgttttgattttatgtgtaaaaaaacctgagtaaattttttttttttttgagatggagtcttgctctgttgctcaggctagagtacagtggcatgatttctgctcactgcaacctccgcctcccgggttcaagcgattctcctgcctcagcctcttgagtagctgggactacaggtgcccaccaccatgcctggctaatttttgtatttttggtagagacagggtttcatcatactggccaggctggtctcaaactcctgaccttgtgatccacgcacttcggcctcccaaagtaatcactgctgggattacagaagtgagccaccgtgcctggccaaacctaagtaaatgttttaaaattatactactaacatagcatacaggctttagactgttggttgcttttaagtttgcttactttaaaagctagagagaagatggttgaggtgatcttgtctccttcagtattcactctgagccatgcctcctgaggaagtttgctttaggggaggcattgctatgttatacactctacgatgcaccagcccttgcctcagaaggcaaggtttgaaccccaacactgtcttttgcaaactgttaccttaggaaatagattttatctccttaactcactttttacatttgcaaaatgggtaaattgtgactacctcacatggatgtcatgagatgaaatgtaagaatgtgtgtccctggcatatagtaaccactttcgccaaagactgagttatccaactacagacagagaacagctggtggcctaatcaaagggagatacaaaataacaatgccaagactggaaaaggaagttcatcttaggatttccaagagaaaaagaaatatgactgtattataataggtatatttattaagctcttaccatgtgccaagcaaagttctttatatacatgatatacttcatatacattatttcatttagtcctcatggctaccaggtgagcaccattattttcccattttacagatgaggcacagagaagttaagccacttacctaggaagggcagtcctagttaagaagctgggattcaaatccaagaggctggattccagacctcaggctctattatgagaagtacctaaatagagattggtttaaccaaagcctgagtcccaactaagggcaagactgtgacacagaggtcactaatcagaatgaaagattgagccagagttgagttgttggaatgtattttggtacatttaggttgttttaagtatatcaatctccattccactcaatggttgagttcagtttcaagttttccaaatgctttatgggaaagtcatatttttctcccattgcagcagggatgccagcgcagccatgcttctcaaccaccaagtagaagcaaagccaaactgacccaagaagatgaacagagggaatccagggagttccaacttgggttcacagctgcaattctcaaaggatggactaagccatgtcacccctccagataacacagtcatattaatagtgaccttttggaggcctccctaaacagcaggtgaagtcccaaaatcattagattattcctggcctcaattgtggcccagagggagagccctaagatttttccatgggaacaaagatctaaattctgggactatctgggccatgtccaccctgcaccatttactacaaaatgggctgatcctatggaagcacactacctgtgttgtggtcatatagatcatcacctggcttctccagggctaaccagttagcatggaaatgggacacccaagaacaagaggatagaaagaagggaagggtggaaagaaggaaggaagaaagggtgggagggagggaagagtggtagttttggaaggaaggagggaatcagagctaaagataatacatgatatgagtcagtgttcaatgtccctgaagattaggggaatcaagctttgcttccaggagaattaacacaggagagccaacagagatgtggaaatttaggaagtcagaggagacattctttcattcattcattcgttcattcattcacttgctcatttttacatgaattgactctagaacagatgctggagatacaaagatgcatgagacttgcccccatcctcaacagtcattcacagtctaatcagaaagagagccttgcatttggaatacaatatggagtaataatacctctgtgttcagcctgcacaaaatactctgtatgcatggtcatatgtcccttgaaacaactttatgaggaagatactactatagtctccatttgacagataaggaaactgaggcttagggaggtcaaataacttgcccaagtaaaacaactagtaagtagctgaaccacaaaacagagattcatgcagaaagctgtacaacagaagaaaccaggactacatctgcctcaaaggaaccagagaaggcttccaaagaaggcagcattttaaatgggttttgaaggatgtatagcagctatagaggcagagaagaggaaaaaagtcatttcaaacagaaagaacaggttgtgcattcaaaggtgaattgagaggagagaaaagcatgttcaggaaaagacaagacatttgtggccctgggagctgagatatgccctcgggaaggctggagatgatgtcaaagacgaagattggacaataatgcccatcaggccaggagccccctttctggattcgctgcttccactcttgtgtagaatgatctttttaaaatgttcatcaaatcaggcccccctcttattaaacatttcaaaggttttctgttctacttaaaacctaaaacccttcttttgtatgcaaggcctgaacagcctgcctttatcctgtagacaaaggggagatgggaggaggagctaactcacaaagacagtggttatgtctgctctactcacacacatccctactgccccgcacggtgcccagcacatagtaggtcctcagtagggtgttgaatgaatgaacaaatcactgatgaatgacggccctaagcagggatttttctccaaagcttcctcacaccttggaatgcatttgggggcccaacacaaaggtttccaacttcaacagcaaaaactccacctcccacacaatgtagagttacttcttgctcatttccagtgggtttctgtctttctccacagcctgactccttctcaaaatctctctattcccttccaaatatacattctaaatatttacagaagcttgttattctcctcagagctggcctagagttctcctgatatttcaaagaatttccaagaatagggaaatctcctgatatttcagagaatatcccaagaatagataaagttccatctgacaaatagatgctcagtaaaatctggtgagtgaatggattaatgcaaaaactaattatcatgctgttcatggcaagggatatgataattttttcaagtccaactctggggcaccctcacttccacgtcacatgattaggaaaagggcccaggtggcattcagtagacatagactaagcctcaaccccagccctcaggcacatcagtgccctctctaggctctctctcaccaactttagaattgaattacatcagttgtttccagatggtgatctgcagaattcctttaaagaccacctgtgggatttgagggaggaaaactacactctcccaatctccctctttaacccaagcatctgattgctttcatctgttttacatacttagcttctgtgcacaacttcctttgattaaagagttccttgcctttatagtagtggatgatatctaaggatgatgtaaaatactgggtgttagctaaggttttaccaaacttaaagcctttatgcttcataattccactttattgatgtaggaagacaaatgatagacttactttcaaggtggatagaagggatgcgacctagccaaggctacagcatttctctatggcaccactgccatgacaaccatcagtttgaatgccttatgggtgcatcctatgggttatgcactggccccaagccataacccctaggactctagagccagcagcaaacacaaaacactgaattaataatgagtgagatctctgttcccatagctgccacaggctaaataagttgagggggtattgtaaaacccaagatgagatcactgagcctctggtatcaaaaaggtgtatttcacagaatgtttagttggacgagagcttgaagagcatggaaacgatctggtatcattctggtcaaagaccagaatttagaccccagttctgccatttgctgactaatgactttgggcaaaatacttaactttcctgagagttagtttcctcatctataaagtggggtaatataacccaccttgcaggatactggtaggattagttgaaataaattgtaggagaacatttggctcagtgctaagcctatataaatactccacaagggcacagagagggaatgacttgcctaggatctcctcctggaaatcacacaacaattccactagtatcatgtggcccacaggcagctggtgggcacaaccacactggttcagcattgccatggtccaagaggcttctggtgcccagggaaccagcagggtcccctgagcgttcctcctcagctcccaacacttccctccaggcaccagtatgcagggcaaggtcctggagggggcgccgaaacaccactcgagatcctcactctcaggaattcaatatagaaaacacattaagacctgtttacatggaactgctgtttataattattgttccctatgggatattccccactgcttcctccaatcctcttttaaactgctcaactaatagagttttcctggcttccccagggagacattcacagatgctaatagagacataattcaaaaattgcttgatatacatgccctcaattttccccaagaaccacctaagtaaagagccccagacatgcaacacattcattggccagatgcaatttaacatgcgtgggattaaatatacaggctactacagccaggttgtcatcaagcagcagcaggcatggcattttatcctaaggtaccaccacggccaaatgcaacaggaaagaagcaggctgctgggtgggacccctggaagatcccctcctctgtaatttccactgcaagcttttcccaggccttttcaggcaaagcggggagttttgaaaataaatcccccaggcttggagaagcaaagaatcaatgctaagcagctccggaaataatagcttccatctctctgatatataaagaggataaggaaggcagaaagaaggggcatgatattatgagattgcaacaatacattgcaacattacattaaagaattacagaaagcaagatctagcttcagatgccagttcatgcacttactccctgtgtgaccctgggaatcacttaagctgtctgagacttagcttgtctaatgacaaactggggatactaatatcacctcccaggattgttgggaaggtaaatggagattgacaaatgtgaacacacttagtatgtctttacatagtaggtattcaataaactcttctatatatcttctctttctgaaaatctgaatatggggagcatggatatgcttatatgttggttaaacaaatgcatgaatgttgagcaaatcagaaaatactaaaattagaagactaaaaggagtaaactaggaccgattaaaagaagtttgccttccccaaaactcataaacttaatgaaacttgctatctccagaggaaattaatataaatttaaaatagcataggtttgagatgactttagcggagtttctggagaatagatccatcactggttaataaactaaaaatatagagagaactgcccaaggttacacgagtagaaatttggtgtccccaccactcctttttattgcagagggaattgacattcagggaatggaaatgcccagcccagaattggggatgtggtctgggaacccaggtctcccatcccactccctcgccctctcaccccctcccgctggtcagtgttctttgtcctctgctggcatccctggggacgggccagcccccatccccccgacacacacacattgtcccttcaagatggagccaggctgacaccacgtagaatgacctggaagcccccactcagtctaccagtcctccctcctcacacaggaatagatgggagggaaatgaaataagctgccatctgctgtgcatcctctgtgtgccatgctctgggtacccatctaatcctcgtgaagaccctgagaagtgagtgttcttcacagactaggcaacaccagaaggcaggtgaagaacgtacagaagctacagagtgcacaggtgacaggtatgagagccaagccattcaaactccctgggtataggacccagctcttcccacgtctctgcctttaccgaatcaaacacctgagcacggaagaccctccatcaacatgaactgctttgaattgacatgaacaagcttcaatcaaactataaatgctgaaatttttcaattatagaaagtatttgaaagatcccataaattcccctgtcatatcacgtgagctgcatttactgcagcagacactttttatctcgggcttggaggaaggattagcaagaagaaagtggagggggtctgaggaagggctggcagcctagaggaggacagcagcaagaagcaggctggaggcagttctgtgctgccggccttcatgggtgtggcctttggacagcaccttagcaggaatgtggtggagagcagccccattcactccagaggagagcctcaaactcttcaggcagatctagcctaggtagaatcttggcctggcccctccgggatgacaggtgccattgcccaagaatggggaaaaggctgaagtgctccagccaaagaccccaatttatcttcaggacaattttcactggaaaccttgcctcaccactgcccactttttcagaagtaattagaatgctaatctataagaaagatgactattaaaaataaattaataatagataatacattttggcttacaattttgaataatatagccatcccatcttaaagtaaaaattcatatatttttaataagcctgagacatgttttccaatgaaccacagatggttcatttttattatcctataaagagacattatgggcaagtgttttttaaaatggtaaaacagaaccttagagcagctctcttttgaagatctctaagcactttctaagcatcaggacccccttctgtcatcacagagactgaaatgaggagatggtctctgtcaccccctcactcaccagtgagccccagaccttcatccctgatcagatggaagcagtgtggcatgattacagttcatatttcaactctgccactcaatgactaatagccaagcactaataatgcagaaaatgtaaatttaaaaaataatcttcctgagattggttatgaaatgcactcaacacagcaccatccacagagaggttctttttaattgctcttttctttcctctcgacacccagaatcacaaagcatgcctgaaagcgtcacacatatatgtctgtgaccataacatggcattgcacatgcaaaggaaataaataggtgttacccatgtgacaaaggtccatgagctctgtccgcaaaaagctgttgagtttaaagaacaaataattctgaaaaatcttccaggagatgaaatttgtagaactcaagggcagtaaactagctgctttccaaggacttgtcatagctttattgacttacaatagccaaagataagtcagtattaatcaaacccattctctagaaaaacctcatcatcactggggccagggcagagaagtgtgacacagctctctccagcttccccacttcacagcatggttccaccatccacccaattgctaaagcctggatagtcttccttgtcacctcccgatccccttctctaacacccatcccccggccacccaacatcagcaagtctggtggtttctctctgtcacagagattcaagatcttcccctcatctgtctgtttcaaagttaacatcatctctcatccagacagttgcaacactctcctagcaggtccttctgcatctattttttaattaaatttttaaagataaaaacattcctctaaatagaatctgctccagaacccagattaaaaaagaacgagaagggggaaagaagattagggcatcccagaagctccctatttgccccatttgattcattactccccaaaggtaactgctatcctgacttctagcaacactggttaatttccgttgattttgcactgtatattcatccgtgctgttggacactgtcatacttgattcattcacattgctgtgtaacatttcattgtgtgactattttaacatccattttactgttgaacacttgggtaaacttctgctttgaggctattataaacttgacacttctgcttcccattgctttaaagataagagcccaagtccttgtcagacaggtgaatggtccacacagttagcatcctaggctgggcgcggtagctcacgcctgtaatcccagcactttgggaggccaaggcgggtggatcatgaggtcaggagatcgagaccatcctggccaacatgatgaaaccccgtctctactaaaaatacaaaaattagccaggtgtggtggcatgcgcctgtaatcccagctacttggaaggctgaggcaggagaattgttcgaaccagggattcgaaggttgcagtgagccgagattgcaccactacactccagcctgggacagagcaagactctgtctcaaaaaaaaaaaaaaaagccaggctttttctcatctcataatctttgcgcatgctgttccctcttcctgaaactgctttcctaccacttctcacctttatgcttcacctcgtagtgttcatagactctccttccttcctaacttaaaagaggctccttctggtttttccttcatacacttccctcactcttttccttcactgcactaaagatgatttctaattgcatagtcattgatgccagtatttgtttattgtgtcattcctgctgaacagaggatgggcctgacttatttgggaccatgttgctgatgcctggacctaagcctggcacagagtaggagctcaacaaatttgttaaatgagtggctgaatggccatactctcaaaggacccacagtctaggagagacagaagaatctttgtctttttgtcttgcagtgggatggaagctgcagggaggggtcttgtcacattgatactgtctggggaagacagaaaaacttcagtttcagaggaggtagcccttgaaacgagatttgagagagggcagcacattgtacaactccatgggcaccatgcacattgtagtccagataaacagagccccttggagatatgtgaggcatgggatagactcagagaaacccaggaaataaccccttcaggcatctgacatgcaaagatgtggaagtgtcaaccaggaagtcatgttgggggaacagcaagtatttacagaaagtgactgtgtgtgtctgtgtaggagggtgactttgtataggagagataaaacctgtgagctaatcaaggagaagatcataaaagaccttcataaagagcatggcctttttcctgcaagcagtgaggagccattgaaggctttagcataaggacagtcagatgtacttccctagaatgcacatttccttctgctccagaacttctgcacaggaggctcctaaaagctctccccatcctccctgtacacgtagaatctgcctctgtctctctttctctctcctcctcctcctccatctcctcctcctcctcctctccctctctctcgctgtctcacacacacatacacacacactccttccttcctatctagtcagattccactccttgggatttcaggcccaccgtcactcctcagggaagcctgccctgaatgcctgcactacaccagggcccctttcccctgcccccatcccagagcaccaaatagctttcccttgcagcacttctcacagctgtcattttatgtttgtgtctgtgattcttaggttaagtccctcatgcaccaaatcataagatctgggaacaaggaccacacctgtcctgttcatcactgtaatcatcacactgcctgccaaagtgccttgcacatattagatacttagtagttatgtgttccatgaatgactctttaagagatcttctagctgttcttgcaaagaacccattggtaaggttgaacctacaggctgatactttgcactagtctcaggaagagatggtgagtacatgaaattgagtcccccagaggttaatgcccagtgccccagctaggaaacgtccaaggaggcaatttgaaccccatctgtctggctgcagagcctagccctctaatgcattcaggggtcctagctcctcgaggatgccactgtgccgtgaacttctttctgaccctcatggctcccagcacagcatccacactcagaagtgcaagatgaatgtttgcagataatgaacataaagctctcaggaaccctcatctcctgagaatctgctttggcccccacagcaggtctgggtgtggaccttccccaatggccttgggaaattatcaacatctccccattagctgttgcaatattaaattgtgtgactggaaatgaatgaataatcccatgggcaagtgagggagaccaagcagcagggatttaataacaagtcctgccctttctccaagcagaaggtcttcctaattaaatattaaaaatctatccatacaagcaagagcgaaaaattgcattttcagcagtgcagctttgagatgctgcctcagaagacccaagagctgtgggaatgccctctccaggacctagaagagggggccagaaaaccgccatgtggtaagcactgccgggtacccgggtatcacaggccttgccacattcaatcctcatggggacaatgagacaggggttagatcacagccactgtctaaatgagcaaactgaggcttagagagggttagtgacttacccaaggccaccaggtatcaagtggcaaagttgggatcttaacccagttctatgtggctataaagttcatggaatagaatgctgcagttaagaacatgggctttggcatcaagcagacctgtatttgagccccacctctgctgtttattaactgtggccctgggcagatgaccttacatccttaagtctctagttctttgtctttaaaagggtggcagaatgtacctcactggttttaggaaggtcacatgagatagtgcacatgaagccctaggcatgggaaaattcttctaaaatgtcagctgccattctgatcactgcaagacccccacccccaatactcccaattgtaccaccccaccccactcaccagtgtctcagaaatgcctcctccagaaggaaggcatcctgtctaacccactgcttctagccaagctgtctttcttcagaaggtagaaaaagattgttagtcattgtttaatctttattgagtatataccgccacaccaattgcactgccattcattatctcatttaaatctgacaagagccttgtaaagtagggattattcccaccatttcccagatgttgaaactgaaattgataaacacgacatgttgccatggctacatgaagatctccaagccggaggatctccaccctcacctgcctagcttcccagacctctctgcagaaaagggactgacccccaagacagccctggcctctgggctccaccccttccacatccatcccagggccgctgaggactgaagagttctccacgtttgccctttaaagtgacttaaaaataatctttatgaatttcttcatatacaaaatttgtacttactcattgcagcaaatttagaaaatacacataagcaaaaaagaacgtaacagccatccataaccctaactctcagagatcaccactattaaaatgtttattatctaagagagagatgatatagacaaagatgagacagattgacacagagaagatgggtacatgatagatattttctgttttataacccttgctttttcttgcacttctaggaatttttctgagaactaatctgaaatctgcacagggtccccacgtctcggatcctcatcccattgcctcccaccttcttgaactttgcttcaataattatcacacctcctttgcatgtttaatcttcccccttttaatgacaactaccaagacctgtttcctagtgcagggtcatgaggtaactaaaataagaattaaattgctctgtgaaaaaaaaaaaaaaaaaaaaaagttttacagtcccaggagattttctccagccttatcatattgttgataccatagggtcagttctgaagctgagcccaactcagccctaagctttctaaaggggaattgccaggtcccctggtattccagctgaaacctcaaacatcctaaattgtaggctctattaactaataaggagaaacacacttccttccccttcccatgacttgtagggagtctagggtctcaggcctatgtcacaggccctcgattgccatgagtcagcaaggagaggaaggacacgaagccagcaggcagagagctggccccacagagccatcctccgtgaagccccagcaaacgggagggaccaagtttgtttcagttttcctaaaaataacaagactgtattttctttgctgttggctgtccctaaaactgttaacatgggttcccagcctggcacaatgtggtccatgcctgcctcccacatacctgcctcccacccctctgggccttgttcccttcatcccagcctccagacacacctgcctcctgtcatctctagagcaggcttatcttgttctcctgtgggctccttgtagaggatgttccctctgcccagaacgctctccctcactcatcacctgttggtccccttctcctccttccaggctctgtgtcaaggccaccacagagaagccttgcggttatgtttagttcttcctgcctaagttcgcatggtaacccatacctttcctccatcataatttgctcaactgtaatcaaacattatttttaaaaaatcattccagcctgggaaacagtgagaaacccatctctacaaaataaaaaataaaaattagcttggcattgtggcatctgcccgtggtccctgctactcaggaggctgagatgaaaggatcacttgagcctgggaggttggggctgtggtaagccgtgattgccccattgcactccattctaggcaacagagtgagaccctgtctcaaaaaaaatattattcatttaatatctgttgccaccacaggactgatccctctgtgagggcagagattgttcatgcatggaattgtgatttataagcactggctctggagccaggttgcctgagcacggagccagctgtgccctgcgggacacctgtggcacacttcactcctgggacacctgggacacgcacacaatagaaatgttcacattttactaggcaatgccagtcacatagtcctacctaatttcaaaagggtaaaaggtacacccaacacgcatcaggaaggaggaggaccagaaattgttggtgacaagcacaaatgaccaccccaatataatattttgtttggaaggcattttattccacaaaaacaacattacaataaacacaacaacaaaacactggttgcagtagaaccaactttccagacctatctgcacagcacaaccattatcccactcaaaatgtcatgtttttacccaaaacattaaaattttaaaagcaattcaaacccatagcttaaaaaatgttccaaccagtaataaaaggaaaagtgtgcctcctcctcccaacttccctaccccacaatcgcaagatattatccttataggcgaaaagggtttcaggatttgagatgcaggctgggaggtctgagaagacttcctatagaagacatgacttcaaactctttcttgtatgtgagatttaattttcaaagactcctctgatccaacttaagctttatggtaaatcaccttgggacttaaatgatgagaagcactgctatctcacagtgagaaattcagaagggctgggagttccaagtcagagctctgatctggaaagttccatcaaagcgtcactccaggcttagcggttgccacccaccactcgtcagactaaacagcctcagagccctgtgacctgctaatgtattcacaaactaactcagctaattaatcccagctcattcatcctctcaaactatgcaagtcttccagctggccctccggcttgctgccctggctaatggagtgttacgtggactctctgtaggttgcaccttactcgcagccaagcaaaggcactcattaagaagctgagccccagggctcccccatgagtggggaggaaactcatgagtgccttctatatgccagcgctctatctgcaggggttcttttgatagcagcagactgagagatgatgttactgtcccctttttcctgttgttggcaactgagactcagaggatggaagtgacttgctcaggtccaccacctcttcagctgtggagctgcgacaggagcctttgtttgacttcaaagctcaccatcactcctctctcactgatgctcaagtgggctatcacctcgcctttcctgagccttccttcgctatcctaaaacagcgcctcccgaaatcaccactaaagaacttattcatgtaaccaaacaccagcggttcccctaaaaacctatggaaataaaaattaaaaataaaaacagtgcctcccatgacccatgtctctccagtcccataactctgctctatttccattcacagctccatccccacctttatgtcttttgttcactgctttatccccagtgcctagaagagtgcttggcacctagtagacactcagtaagtatttgtcgaatgagttaataaggttgtgaaaagaacgttagattactggaaggattcatctgagtttaattctgctatgctgggaatccagtgtgcggccttggatgaagccagttccctccctgggccccagtagccacatctgtacatttagagggcaggagaaaagccacacgctctgtgacttatacaacttgttgcccagagtggaggctgctttgatgctcagaaaaaagaaacaaacatggaaatgctaaatgggtggcagagagcttgagggaggaaggagatggggagggtactcttgaaactgtttggtgtcttccctcctgccccctcagtaccaattgtcaagtacagaaagtgaaggagacttgtattagtggaatttggtccctgacttgttatagagacacaattacaaagacacaagagtgggcccagcagagacccttagggtggtcccttgaggttccaaagcatctgcccatcaagcagatgatgtgattagtctctgtgaccccaaggatgcctcctgaaattgctgattcaatttctcctaataaaataggaacaataattagctaataagaaatcaacaattaaagctatgagagaattaagtgagatcatgtaagcaaagtacatgtcacagtgctctgcaaataggcagtgctcagaagtgtcaccttttctctttcttctctgagcctccgtcttctcttcggtaaaatgagaataatattatgcatacctcacaggggttaagcaatgtgaaagtactctgtaaagtataaggctgaaatgtactgggctcagaacctataggtctgttccattctcgacacacgtgatattagcagcacggtacatttaaggacacggcttgattctttaatcacagggcatcctgtcttctccacattgcttgggaccccaaaaaatgaagttctgtcatgtctctagaccaccaccaaacacataaaagtcacttaggaaaacatggtaggaggcagaggaaaggaattgttgaacagggattgcagattcaggtatataaacgagtgatgatgactctaacaacagctcttggtcttagtgttggaaatgtaatagggagtagtggggactgcggtttaattgttgccgtgtgggaatgtgggcctggcatggccataatttcagatttctaaaggaaagccaaaagttcatatttttatgtgaaataaatgttgataaagttcacacttaaatgaagtgaaacagaccagggctggtggtttatacctgtaattccagtgctttaagaggccgaggcaggaggatcacttgaggccaggagttcaaggctagtctgggcaacacagtgagaccccatctctaccaaaaaaaaattaatttaaaaaataaaagaagtgaaacaacagtaccctgtgggctgccagattgtgatttctgaactaaactgtcagattacaaagttacccgctaaattagccaaatactttccagatattccctgggccactgtctcgggactcttaatatattttccaattagttccttttagtgctacatacacacttttagcaaataatgagcacttactagtcactttctatgtgcaaagcagatattagacatcacagagggagtgagataccgaaaacaaaaataaaacaaaaataagcacaagacacaatctccgcctaccccacccttgaatatgaaaactgtgacacccaaaggtagattttgatacctgctgggtgattgctagagataataagtgctttgggaatttggacagagagagcttttttttgcagtggtctgagagagctgcccagaggagatggcacttacgccatgttttaagggtggataggattagtgccagatgatcacatgctctggtagacaggggtctgtgcaccagtagattctggggctattgcagaggactcatgacagggattagtctctgtgaccccaaggatgcctcctgaaattgctgattcaatttctcctaataaaataggaacaataattagctaataagaaatcaacaattaaagctatgagagaattaagtgagatcatgtaagcaaagtacatgtcacagtgctctgcaaataggcagtgctcagaagtgtcaccttttctctttcttctctgagcctccgtcttctcttcggtaaaatgagaataatattatgcatacctcacaggggttaagcaatgtgaaagtactctgtaaagtataaggctgaaatgtactgggctcagaattggggaatcgtctggaaaggtagaccagggccctagcgtggactcttcagcgccagcaggaaaatctaggctctgtcttgaaggttcctcagcaggaaggtggggggttgttgtggggtgaatctgatggaaagggattcctcctcctcctcctgctttctccagggtgaggaatctaggcactagccctggggcccctccaggtcccactcttcacctcttgttttttatttctcctgccatacaaccttctttttatttaaaatagatttaagcaggatagagccccctcccccaccatcaaggctgtttccttgtaggtggggggatgccttcatggtaatgatgtagaccctgagacaatatagagaggcagcagggcttggaaacaggcagtatttcctctttttatgatggtttcattttacatttttattggcctttcactgattgctcccgggctctctggcaggatgtgagatgcgctgacatttatagaaatcaatacattaataaatcacgaagttcataatgtctgatttgcttctaaatgagacagaactattatcgccataaagttgcacataaaatatgcccaattgtgatgtattgtgtagtctaatcaaaggcatttgagtgaataacctttccccaaaagaaggaaacaatcaaagctgaataacttcattaataattcaaggtgtgtctgccaaggcttcatttattaagtgcacagttaagaggcttcagagctgaatcctggagaggatagcaccttgccatcttctccctgcctctgggcaggcggatatacattctcagatgaactgactgcactccttgcatctggaagttcatgttccagtggagggtaatgcccagttgacttcttcagctaagagatggcccgtaacagtgctcatggactgtccggattcttaagggcagaggagccagagccaggaaatgtccttagtggccatcagttgttatgtctgttcactaatgttccaggccctatgcttctggtgtccaccacccacagaccccctgttctgttccacggactgagatgatcaacagtctttcatccagagggttgtgtttgctggtggccattacctttaacataaaacgatcatatttactttatcctattcatgtccaacctcaactgacaattgagttgtgtctctgacaataaatagcagaaaaaggaaatcttcctatactgaagagaaacacaattaattaactagatccatcaggaaaggtacaatcatgattgagacagtgtttaacagatgtgactattggattctgttgttgagaatgacccttaaaatcacagtcaaaatatacgacaagatggaaataacatttttgagcacctactatgcatgtagagcatcttacataccttatctcacttagatttacagctgcaaggtgggtatgattctagcttgaattagtctaataaccatatacctcctaggggcagtgagatgattagatcaattctaaaactattaccatgctctctgagctcaccaagacaggcagttaatacaaggatacattaataccgaatccagcaaaagctcacatggccagcttccattatgttcctatttgtgattattctgtatcaagcacagaaatgtatgttcacacgaacaacaaagaaggggtttattagtgtggattacagggcctaagcctaccctctgaaactggttttggagtctttagcacgcttgtttgggacagttaaacatgtgccagctattctaaaacagtagcagtaatgtgatagagctgggtcataccgtgcttcccaaagtatgatcacttcatttcaacaacttcacactaacagcctgaactgggctgtgaagggaatatttagaccaaggaaactggaaaactgtatcaatcaggcttttccaccctccccaagagccagttgtcagatatctaccagcctaccaacgctagctctctaatcagaaaccatcacttagcaagttcccaaattatctgcagagcaatgaactcctcttcttcagaaagcaggctgaaagatacactgttcacatcttagcctgacctggacccagtgagtttccatcagtgagaaaattctgtgctaacttgagataatactattcttgtggcaattttacttttcctttgagcgattccttcaacctctctctgccccttcatttttccgtcttaaaactaaaagtgccctttctccctggacactcctcatttgcaatgaattgtcatttcagctcctcagtcaagaggagtaatgaaatcccacccgtgttaatcctcttatatcccgcagaaatattgtagacccactcaccctaggcaacatgccctctctcttcaacacaggtcatcaattgttcatttactggctatctccatgtactggaacttcagggtggtgtccagctgggttcaaaggagaaacagtgggaagtttctccactgccacctgaattagatgagaaagagttgtctactgaaatacactagctggtggcaggattgggacgtcatttgactaattgcctcctagagctgcagagactgctggaactacctaagtaaatcatcaaaaaaaaaaaaaaaaaaaatcatcccagggcactttttccagacaaaaaggtccacttaaaacatcctctagagatctgtgcctgaagctgagctgctgcaatgaaactgacatttctgccttgcagcctggccatgggcttagctggactaaaatgctgctgcagtggtgagggcacgtgagagtccctaatgtacatggccttgctccttgtcctgacacatcttttagggctgctgctttctctagtgctggaatctagataattcctttcccagccgtttgtttcttcaatcttggaaaatatctggatgaatgtaacactgtcacacacaaacagaattatgacttacgtcacattctatgtcgtgattttgtggacttttaataattgcattacatttgtgaccattaatttccaccatcgccctgctcctgagaatctgtaagggacatttgacactcctctccccacccacctcaacatttgtgctgacctgaaggtcacattaaaaacatacccatttggagagaaagatctgtctactgaaatacactaaatattgaagaatttccaagtcatttgatcttgaaaactccatctaatggaagcagaaacactcaaaggtttttttttttggactccctttttcaggacactttcaggactgaggtatataaatgaatgagaaatgtataaattcaatttcacttaaaaggagcaggaggggtttcaagattaagagaacaaatgcttgaagcaaaacatgatttgagttttattgaaccgagaagactgaaaaaaatacgtggaacactcagaaaatctttatcaaggctcagctgagcactcctggggctcattgttaagtttataaaactcagagctgatgagttgtgtgcactgtgtgggtctgagtgggcttatgactcccctccaagcctggctgtaagaatctaagacttaaagctgaaggaccaaatgggactttccgtcccatcccctctctgctccatgcaagcaccaacgtggatttttgcccctaattatattagggaacgctgtcaatcaaaaagatgatgttaaactcatccagaacaaaccaaaccatgtttaaggggaagaaaagattacatcttcaaatgccagcatgccatcattaatacaatgtctaatgtagtcaatatagttcaggcaacattgaaaatgaaccactgcaaatactaggaatacaatttcaagaggaagcacaacattctgtgtttctatgcacacagtcctgtaaattatttgcagctcaagtatgtcatgttcttttaaattttcccctgggtacagcttgaacaacttcctacaagtgttgatatgtcatattctcattatcatttagttcaaaattaccatgatttaattaccatgaggttgcttttttgatacatgagttacttagaaattgaattaggctaggcatggtggctcccacctataatcctagcactttggaaggccaaggcaggaggattgcttgagtttgaggccagtctaggcaatatagtgagacctcatctccacaaaaaagtacaaaaaaactagccaggcatggtgacacatgcctatagttccagctactcaagaggctgaggtgggaggattgcttgagcctgggaggcagaggttgcagtgagtggagatcacaccagtgcacttcatcctggatgacatagcgagaccctgtctcaaaaaaagaaaaaaagaaattgaactatattgcttgatttccaaatgtttttgaggattttctaattttcttttggctattgatatgttgcttaattcaactctggacaaaaacagtctataacttcaattctttaaagttttttgagattgactttatggcccaggaaatggtcacttttggtaaatattctatgtgcacttgaaaaaatttatagtattttatgattgctgagtacagagctccatacgtctcaatgagacaagtttcttaattatgttgctcagatcttctatacccctattgatttttttgtctgtttatcagctgctgaaagaggtatttttaaattactccaattatgactgtgaatttattatttttccttttaattctatcagtctttgctttatttgtattttgaagctacattattagtacatattaatttagaattgttttatcttcctagcagatgggcccttttacataagaattctctatctctagcaaagttacttgccttaacatctactttagctgatgtaaacatagctgtgccagtgtttcttgatttgtgtttgcatggtatatccttttccatcattttacttttattttctgtgcccttatgcttacaagcagcatttaatcagggtttggtttatatctgatgatttctatcttgtattgtagattttctattttttaatttttcagtggttttactctgatgttcttataagtggttttctttgtgtttatcttgcttggggtttgtagtgctccttcactctgtgacttgatatatttcactcatttttttaaaatgttcatttattagctctttaaatatcgcttcattatcattatttatctctttcttttctgagactccaattatacatatgttcaaacttttcatcgcgtctcatatgtctcttatgcaagcttatctgtgattccattctttttttttctttttttgagatggaatctcactttgttgcccagcctggagtgcagtagcacaatctcggctcactgcagcctccaccccttgggctcaagtgattctcctgcctcagcctcccaagcagctgggactacaggcgcgcaccaccatgcccagctaattttcatatttttagtagagacgggatttccccatgttggccaggttggtctcgaactcctgacctcaagtgatcccccgcctaggcctcccaaagtgctgggattacaggcatgagccactgtgcctggactgtgatttcattcttttctctcttgtgcatctgtctgtgcatttttctattgacttatctaccaagtcacttattatctcttaatctgtgtcaaacccacttttaaattggtctgtttaattgttaatttggataacatatttttcaattctacaatttttgattgactttttgtatatattctggttctctggtggaattatctagctttttgtatattttcttgaacaaatgttcaccattattttaaagcccagatatgattaatccaattatctagatcagctgtggatctattactgtattctattttttctcttagtcttgtctcttaatatgcctgacagatttttactgaagggtgcacattggaataaaaaatgtgttacctatctggttgagtcttcagcttcagaaaggtaatagagcaaaggcagataaatccaaacagggactgagctgttttcatgcaggctgccttggtagctctccaaagccttcaaaaatgatgagatttttttttaaatcctttttatccagttgttctcaagggattccacccctgcataggagagctcaccattcctgggatcttcagcttctatgcctttgcatatgctcttcccttgttccctcattcttcaacactcaactgaattatcacctcccttgaagccttctctgacatcccttctagtcccatgccacccaggaggcactaagagcttcctcccctcagctcccagttcttaaacatgtcaacactgttttgaaatgatttgccaatgaaaaattctagaccagcaaccaacaacatccttcccaaaggtgtgttatatatggtacatgctgtatgtgctaaacaccaaattcattgataacagctaagaaccaggaaacaaaccatcgttaattatggcatctcttgaaaaatctaaagatctggactcactgggcttaaatgactgcatgataacaactggttgagtaacaactgtttccctttcatggagcagttactctccagttctcagttcctaccactctctatagttgtacactcatcatctgtcctcatctgaattacctgccaatgactactggcatttgagtttctaatccatggtctatgtgtatgcctcctcaccagtgtgagaactcatgtaaacaggtattatgtcttttcatctctctcctaatacctaagacattcctggcacaccagagcatgtcaatgcttctaaacatatctatattaaaatgctaccaaagcattcagggtagtgaaactattctgcgtaatgctgtaacagtggatacatgacgtcatgcatttgtcaaaacccacagaactgtacaacacaaagcatgaactctaatgtaaactatgggctttagttaatatctacatatcaataccggttcatcaactggaacagatataccacaccagtgcaagatgtgaataataggagaaactgtgagggcggaatatacacaaactctctatattttctgtgcaatttttctgtaacctgaaacagctctaaaaataaagtatatttataaaaaataaataaatacaaatgccacctcaccagaaggatcaaaggggcaactaaatccagcaaagtaagtgtctcacgtggaatacaggtcaggaaatgagtgaaaacactccaatggatgcccacctatacgatcactttgaagagcagcaggaaaataagcctctgctgtctgggttgcagattgggggacaggagagaaactaatacacactcaagatggtggctgagctgccttacacactcgtggccaggggtgcttgcaagacaggcggaagttcaaataagagcctacagaggaaatccaggccaaccacaaaatagacccacaaaggccagcaggagagtatctagtggagctccctgggaccttggactcacccagctccactgtgccatggataattttccaggtctggtattttgtcttgtattttatattctgcataatgggggacttggccggcatccactctgccacacatcctaatgggctaaccctcttctgcaactacccttttctttttctgcatctggttactaatcaagcttaatgggggaagaaagaatcaaaaacttgtagactgtaagctccaagagaacagagaacagagctgttttattcactgacttgtacctagtagatacttcattgacagttattgggtggagtgagcaaacaaataatcctacaagatatgcagtttccaatcacaaagaagcagagagggggaatgggggcctcctgattgtggagggtatcttataagcctctcctcagtcaaacatgcgagtgtttccaaggacccatccaacattgcacatctctgccatgtgccatcccatctctgcaggctgcatgactgcatggctgagggcatgttcaatgagcccctgtgggagccatgggcactgggaggcaacccactgctcttgcctgttctgaccatgggaaaaggacagggagctcagctccagctctgctactgagaggctcttcgcatatgtcaagctggacgacgtggacaccctcagagcggcctctctccattgacaataaaagtgtgttttgcttttcgatgaatcgatttggtaaaatgttttctcactctttcctagacatcgcctggtggtattaccagtatcagagaggtaaaaaacagtttaaactaacctgactttggtcacatgacttgcaaaggcagagcttcttaatcaagctcatgttttgtaattagtcttctcatgcaccagctttctgtgtcctttgttaacaagccccacatatatagaaacagttggaaatgttcttttagagacaagttacaggaaaagctttgctccccgtaagaaatggttacgttttccttttacagacatttgtaaaaactcagagcccatttgcagctcaagtgtagtaattgcttcaaacaaatggcctggatttctgtgttctctttttctccatggtcttcacctcctaatctaatcaacatatactgaggcagtttttcttattactttatctctttttatttcatatttatttcctataatcagcttcaagtcctttgtgcaacaaagtggcatgtgtttaaataaacagtgaggagtaggctatgtggtttgtaggtgggagggtaagtaggtatagatcaaaaaccaaaaactcaatgcctattgcacagggcaagcagcataaatgaattctgtgagccaggggtgaacaacaggacatcctagaggctgtggctgcccagaggggacagccggtgttcagctctagcaggctgctgaagtgtctgaatttgagaccaaaattgtcagataatcccattttccaagacaaatcagacatccagatttgtacatggatctctcatctttaaacatggacaactaattccaaaataattaagatacattttacaggtcaaacaagacctatctttgggccacactcaagccgaggatcactattttgtaacctcaaagctagacggatggccgggtgcagtggctcatgtctgtaatctcagcactttggaaggccaaggtgggcagatcacctgaggtcagaaacttgagaccagcctggctaacgtggtgaaaacccgtttctactaaaaataaaaaaaaattagccgggcatggtggggcacacctgtaatcccagctactcaggaggctgaggcaggagaattgcttgaacccgggaggtggaggttgcagtgagccgagatcacaccattgcactccagcttgggcaacaagagcaaaaatccatcttaaaaaaaaaaaaaagctagatgggtaagtataaagtccaaatcagagacaccatgagggaggcactattggccagtccagggaggagatggtcatggtcacggtcctgagcctgacagaggggtcacctcactggcgagaagacccaaggtgtgagtcctcccactgctcacagtccaggtctaactggtacacaagcacacagcttcgtaggagcatgtgtgctgcaaggctggctacaagcgagtttgcaatttgtgcttgaggaaagcagaatccactgtggggacatgtggaaaccagatatgatgaaaggggcctggactggctggattctaggtccagatatgtcacccattgctcaacgacttaggactcagacaaagccagttagtgagaaggtttagaagagatctcctatgctagaatagcttagcattggctggatgtgtttaacagatacagaaacccactgaaagtacagtcatgctctgcataatgacgtttccatcagcaacacaacatacacaattgtggtcccataagattataacagagctaaaaaattcctattgcccagtgacttcttgaggttcctgaccctgtgtgggctcaggctaacgtgtgtggttgtgtcttcatttgtaattttaaaaaaagggttttaaaagaaaagaaatgaaaataaaaaatttttaaatagagaaaaagcttataaaataagaaaataaagaaaaatatttttgtacagctaggcagtgtgaattttaagctaagcgttatcacaaaagagtccaaaagtttgaaaaaaaaccaaatagtttgtaaaataaagttagagtaagctaaggttaatttcttattgaaaaaaaaatttattaatttagtatagccctaagcataaagtatgtataaagcctacctcatgtttagtaatatcccaggccttcacactcactcaccatcactcactgactcacccagagcaacttccagtcctgtaacttccattcatggtaagtgccctaatagttgtaccattttttattttttacaccttagttttattgtaccttctctaaatttagtatgtttggacacacaaatacttaaaatacttaccattgtgttacaattgcctacagtattcagtacaataacacactgtacaggtttatagcctaggagcaaaaggccataccatacagcctaggtgtgtagcagggctaccccatctaggtttgcgtgagtatactccacgatgttcacacgatgacaaaactgcctaacaacacatttctcagagcgtatccctgttgttaagcgacacatgactgaataagcaaatgtgcagtgattgtgcattttttttcctgagagagtctaaacccctcattccacactcagaagagtctatgatcccaaaacattaaggatcacttaatcaaaatcatctactattcaatctgagaatttcctgtgtagcatcctctagagttggtgattccatctctctttgcccctagtgataggtattcatcactgtgtgaggcactcacagttagaaaatcacttcttaatatcacatgcgcagggcaatggtcccctcactcccttcacacgtaaggttatggaacaacaggcatgagaacgctgaatggcttaaaagtactttacaaacaaaaggtgctctaatttattcttgttatgtcattattgccatagtattacatctcaagttaatttttatctcaaccattcaaacttaagtctgacttagtaactagctcatcattattttttataacaaagtaatgactagcaacatctggcatcagactttgaacaaacctcagaaggaactgtcaaggaggctccccacgggttcacgctcttctctcctcctgcacacagggaacagggccattctccttcctttactgggactacctgggcttcatccagggaatccccaggtggcaacaggagggtggtgaaaaccgctgcccgtcacctgtaaagtttcctgtgaatgtgtctacagcggccagcaccacaaggcatacaaagaaagggaagggagagctgatgtgagagcggcagcgtgggcactcctgtgaggttgccacagctgtagacaagttaaatcagtgcagttcaatcaaaagtcatgacccatgagcgtcacaaccagcacgagtctacaaaggaatacattaaaactaagaccagagcacagctcacattagtgagggatgggatcatttcatggagtttttgtttcaaaatatttcattaacatttcacttatatacatgtgtgtatactgggttgtgatttaaattacaattcttactataaaatacagcaaaagaaagaagaaacaaagagagggccactggtttacctaacatccacaggcaggctacttcccagcatcttgagccccaaagaagtaaatttccttccacaaccgatgttaccacagcctgacacttagccaatgatgaaaacgaaaaacaaaacaaaagcttggcagtcagtatccaaatatgcagatactacagaatctgtttgatgtagaagttgatcctgctacccagacagcaaacaactcatttattaataaagtccagttcctccttaatgaagtgggtttaatagttgatatctcaataattacttagtgcattttttatgaaggtgatgggaaacaagtgctgtttcttgagtcggaaagagtctctcaagctcccacaaagaaatttcccgagcttgtgaggaattcagtcacaggaagatcaaggaattaagtgtactgcaaaaaacccttcatgcttctggctaagataaatctaacagtgtactggatgtcttcaagaatacctcatttactcaaaaaatacaatattcccattttctttatttgcattttaatgtgatttttgcttcatctcctttcttcactcaagccacctgggccgtacccagggaattcctaaggggcaaaaggagggatgtgaaaacctctgcagccccttcggaagtttcttgtgaatatatgcacagataaacagatgtgcattttaaaaataaaaatgcttttagatctaatgctaggagattcaaaccaacaattaatttctctgttaaaatgggttaaaatagatgtaaaatattaatatgtatataagcattctgaattagacttatgtgaatttttctccttttctttctttctttttgagaataagccctttcatttacgtagaaatgcttcagcgtttagataattgctacttatcttgttagctacaaacacaaccataattaaaggctctgtaagaattatgaattctggggaaattggccacttgtctctgtggcgtaaacagtatctaatttataacaaatcatctgccttagtcccagcaggataaggtgatatgtattgcccagcacatgagaaagatggcaattaggaattgttaccaagttacgggagcctcacacgaacatccatcacctttggggatatgtacaagatacaaacttaatttgatggattccttttgtattgggatcaaagtctcaaaagggaaagtgacaatttcagggaaaatctggtgcaatgagaccaacactgatgagagaaatgcacacaatttaatacacctgctcacctgatgtggcaactcagcctgtgcttgctgtgggttgccacaggatgagacatggtctgtgcatattcccagcagccacccatctcatcactattcttgccagcccagatttacagttgttcaatagatggatttggtaatatctgcatgacaacaacaggcagagaaggttagatggcaattgattcttgattggtgtaagtttatagaacacattctggcagggcccaaaggaaatcactcacctacccctctgtgatggtaaaacgttgaaaattccacggacttggaccttgtgatccttcagtggaagatgggcagattccttgctttaattgacagacactttctaaataactaatgcaatcttatattacattatagtccataagggagacatacttaaactactacttacaacaactgtttttagagcctttcaaatggtttgtacaaagtagctcccatttaagatattttcctagtatttaaggctatctagtagacattacaaaacaatacgctgtaaatacattcagatttttatcagtaatacttaacatgccgtaatttgaactttctgctaaatcatgctatccattcctagttggccccaatggtgagagtttactgtttctttaaataattttgtttccctttgctgtctagaggtgtttatcattctgcttacttgcctgtgtctctggaatattcagaaggttccatgggaaacaatttgaatatgcaaagaagttatttttaaagcaaggaaaatgttttcatatggatttattttgagcacttctgcctttgcctccactgggaacatgtttctctccaacgccgaagccccctccctgtgtggtgtttgacgcagaggctgacagggcagggaagtggggttcaagataggaaggccattggcagtgtgaccccagcccacagtcctagatcccaggtcgtgacaccactcttttgacagcccagattgttacctaacaagaatgactcccaagctcaaccattccaatgccatctcctctggttccagataagattgaagatgagctggagatgaccatggtttgccatcggcccgagggactggagcagctcgaggcccagaccaacttcaccaagagggagctgcaggtcctttatcgaggcttcaaaaatgtaagacccgtgcacgctctgaaggcctggggggggttcccacgtgaggctacactctccccaatgccaagggagctcataaggcgtttcccatatgtgaggctgtacaaggaaggccagctctataaagggggcatgagagggagatcacctggctagaaaggaaggctccaggcgaggatggagcaacctcaggagacagtaaacggccaactgcccagaaatttcacagggtggcacatcctcaaggaattcaccctggcccagggtcaagccttagcccttaacataatcataccttccaacctggtggtgcccccacaataatgggatttggccctgctgacttatgctaaccaggctcaccgagactgatgtgtaagccgaatgtcggtgtattaatttaccttgggaaatggaactgacagtggaaacagacactcctctcccttcgctgggacccgctctccttggaagccacatggaagccaggttacaatcaaaagtggagtcagaggacgggagttccttgtttagttgttactttaaatacattaatgtgttcctgcagtctcaggccagtttgagagctctcagatacaatcctggatattaatttattttttaagtttaactctcagagtgcaatcttattcccaaatcctggagtggtgtggagtggggtgggctacagcgacatgcacctggtcaccctccctccaggtgcagtctgtaggtagagctgagctgggtcagttccaaactgaccacagcctcaatgttctccaaactgctgacccacagggattccagcccctcctgggagttatctgacaggtgctgggatgcctcttccttccacactagccttgactgcacatgccaagtgcccagtttcctaccattagggcttctttccttcgatggcagcattagcagtgggcagccgagttggagaaggatcctgtgggaaagttttccaggcaggcactgggctcagagggaacagcatccagaaaagagaagaaatctacactgcttggcatctaccatggactcaataccacctaacataggttcataagatacccttggggaagttattgttacccccattttacaggtaaggatattgaggatcagagactggcttggccaaagtcacaaagcttagtattggctgagccaggatttaaacccaggtttttctgatcttaaagccccaaatctctccacctcacagtgcccattctctgacaatgtctcatcattttgcaaagcagctccagtcctgagatggcactacttgggagaagtggaaatgcacaggtccctgtccctggggatcatgaggaaccccagacaccaaggctgggcccagtcttctcctagtgctggccctcaaatgcctcccgctgactctctccccttcccacaggagtgccccagtggtgtggtcaacgaagacacattcaagcagatctatgctcagtttttccctcatggaggtgagtctgaccttgaaatctatcttgcccagctccctctctggtaagcagccttcccttcctccaagtcctctcttccttgccatttgcttccttctcgaggaagagacaaactcagggcaggacacctccctcatcgtgagaggtgggagtctccaaagctttagcaggaaagaactctgaaaatgaacccaccctggaaggggaagaagggctgataatgcaacatcacaacgtctcagaacagctctagaaagcaggtattataatcccagatggagtaactgagtttcggggaagataagcagtgtactcaagattgcacagctggtgagtagcaaaccaggattagattccataagggtctgaaacaggttttgccatgctggcaccaccattgtgcagggcacttttgaatcttttccttaaaatagctgagacaagctggaattttgtaaaagaacttcagtaaataccgaagactataaaaataaactaattgaaaaagaggcaggaaacataaagttgtgcttattaagccagtttacaagtgtgccaggcccacaacagctgctctgttgccctgcccgactcctgtgggaaccagctgtgtccccatgggcctgggaccacatcggtgactcctcctgtggcctccatgtgtcacatgccactttgcatcctgtcaccaagagctgtctcctgcaagacatcttccctggatcctgacaaaatgcaaatccaagtattccaaacacttcttgggccctgtttctcatgggcctttttggcagcagacagatgccttccttggtgtgtggggcccctacccagatcaggtgggggaggcagttttgtcccatgcaggccccagaattgcagtttgctgagttccactgagccactgtttattgagttctcactgtatgccaggcacagctgtagtttaaaatactttttaaaaaatttcaagagataggtcttgctacatcccattgtagagaggtaggaaagggaagctcagagaggtcgtgcttgatgcccacagtcacatagcttatgtagtacagcggcatccaagttcaggtctctctactctggagtgagtgctcatcccaggcattcatggccgttcagaagaacattgtcatgcagtcactgtgccattcatacaccaacgactccatgcatagacaggcaggagaatggttttctcatgatggctagagggaggggcaagggctcatctcactttttgctagatctaacttcacacccaaacccaaagagttgagtcaatgggccccactccataattttctcctttccatcaccctagcatcactctcctctctttcttgtcgaagccctgccttgtttggaaggttctccctgtgtggaattcctgcccccatcacctgccctccttttctgccttgtagatgccagcacgtatgcccattacctcttcaatgccttcgacaccactcagacaggctccgtgaagttcgaggtacgctcatctggggtccactctaggggtcctctggttctgcatcacctccccctctaaatctcaaggcattgggggaaggtctggaccatcaaaagctctcagtcagaccaaagacatgtttatccatttgtaagcatttcctaaagatggggaaaagcagcagcaactttccctggcctgcaggaactcagggactcaggggactaataacaacagtgtatgagcttccgggcacactgcttcccagtggcagcccctgtacttagggctttgtatgtattaattcatttactccaattcccacaataaccctatagggtagggttttattattgattacctttttacagaagaggagagtaaggcaaagagagatagagtagttttcccaaggtcaaagagcacataaatgataaaggatggatttgaatgtaggcagaatgaccctcaatacagactgttcctacagtccacgtcctcagccactagaccatacggccactgggatgatagacagaccactgcagccatggataaggcaaaaacagggctggctgtgttgatctgtgtctctcagagctccattcttcctcaagggggcaccttgcaaaaaaaaacaaaaaaatggggcagggtagggaactgaaggcaggagctcttcacagagcatagccacatcctccaggcagacaagaggacgcaggaggcaccattctgtgagagtatcacagtctgacccaaagacacagcttcacactgtctgatggcttgatggttaatgtcactctgccttttccccttctcaggactttgtaaccgctctgtcgattttattgagaggaactgtccacgagaaactaaggtggacatttaatttgtatgacatcaacaaggacggatacataaacaaagaggtaagtgagctggggccaggggtgtgagagggctccagtgaaggtaactaacccaacagaaaacagccccaggcatgaggatagcactgtctgaatgaggcaggctctgctttggggctaacagagctggtccctggcaaaataaagaaggcctccctcattgccctaccctgccctgttcccaagcgcccagaaaggattaaacagattcattctcactgggtcacctagattcagtagatattacacagtggataaaaatgacttgtttcagtgtgaagagttactcttccctagggaacctgcatttgggaaggttaggagccacaagtcaaagctaaaagttgaaatggtggaattgtaggcagcacctagaatagaaaagaaagatttttaaggaagaggaacctacaattgggtcatattggccttaaactattttgcctattaatacaaccgccaagggggtaatggaaggtacagctgtctttacagaaattatcacaaataatttctgaatcttcactgctttgcacttttagaacctcagaggacatgtctctagccagtgaaataccctcaggtctatctcaaaactcactttggtatccactgtatcctggtatctcagtggaagctggaaattggcatcctgtaacactccacttgctgagctcctgtgtgccaggcacggtgcctggaggtatagatatcagcaccaatcttcacctcaacccggcaagcttctctctgtaagctcagagagtttatccaactttcattcctcattcatttagtcatgtttttaattaacacagatttgaaggcttattaggtgttctaggtgctggaggtaaagaggtgaacaatcagactaggccccacactggagcagcatagagagatggacaataaacaggccaaaaaggaatcagcaggtagaagatattttggcagggaaggttagcaaaggcctctccaaggaggtgtcgtcatactggaaccagttatacaaaaagccaggaaaagtgttccaggcagaaggaacagccactagagaggctttgaggcaagatagagcttcatgtgtttcaaaaacagaaaggcttcagatggctgcagatgaaggtatgaagctgaagactagtgcaggatgagcctgacaggtcagcagagtcagatggtggagggctagggtaaggggcccatccatattcccctgggaagctcttagatgaacatgttttttgaaagacacaaaaggcaaaaacagacttaaaaagaatcagaaaatctgactagctctgtattatttagagaaattatattcacagttaaaaaccattcccaaataaaattataggcccagatggtggactggtgaattctaatatcaatcctacaaaaaaattttagaaaatagaggaggatggaacatttcccagcttgttttataagtccaatagtaccctgatacccaaaccaaagaaaaaaaggtcttatgaaaggaaacaactacaaaacagtctccctcgtgagcacagataaaaaagctttcactaaatattagcaaattgaattcagcaatatataaaaaggatgatacaatacaactatgtgagttttattctaggaaggcaaggttggtttaacattcaaaaaccaatcaatataattcactatatttaaagaaaccaaagggatatagactggaaaggaagaattaacactgtctttatttgtacatggtataattgtattaatagaaaaccctaagagtctacaaataaactgctaaaaataataagtgaatttaacaaagtgaagacatgagttctatttacaaaaatcatttataattctacatccaacaagcaaccagaaaattaaattaagaaaaatagcatcaaaaagcacaaaatactttgagaaaaattcaacaaaacaggtgcaagactcatacactgaaaactataaaatattgctgaaataaagtaaagaactaaataaacacagagataaatcatgctcatgggttggaaggcccaatatagttaagatgtggattctccaaatttgatttatagatttagtgtgatctcaatcaaaatcccagcaggtattttgtagcagttgatatgggaatgcaaaaaacctaaaataaccaaaacatctgaaaaagaacaaagttgaaggactaaacctaccttacttcaagacttaatgaaaatgtgcagtagtcaagatggtagggaattggcataaggatagacatatagatcaatggatcaaaatagagagtcaaaaaaactaaaagtagagctaccatatgatccaacaatcccactgctggctatataccccatgtaaaggaaaccagtatatcaaagagatatctgcactcccatgttttttgcagatctgttcataatagccaagatttggaagcaacctaagtgtccatcaacagatgaatggataaagaaaatctggtacttatacacaatggagtacttctgccataaaatagaatgagatttaatcatctacaacgtggatggaattggaggtcattacattaagtgaaatgaaccaggcacagaaagacaaacatcccatgttctctcttatttgttggatctaaaaatcaaaacaatatgaagatagagggcagaaggacggttaccagaggctgggaaggatagtaggggggctgtgggggaagttaggatagtcaatgggtacaaaaaaaatagaatgaatgaataaggcctggtatttggtagcacaacaaggtgactgtagtcaataatttaattgaacattttaactaaaagagtgtaattggtttgtttgtaacacaaaggataaatgcttgaagggatggatacccatttttcatgatgtggttattacacattgtatgcctgtatcaaaacttgtcatgtaccccataaatatatacacctactatgtgcccacaaaaattaaaaataaaaaataaatattttttaaaaatagagatagacccacccatatgtcaatgcaacagatgccaaaaagatcaaaggggaaagaaccgtgttttcacagctgtatatccatttggaaacaaaaatggacattaaccttaacctcatgccaaacataaacatcaacttggaatggattatagacttaaatattaaaacaaaagctgttttcttaaggaatacataggagaaacattcttacaactttggagtaggaaaggataaggaatcatttcttaaagtagataaatttgactttatcaaagttaaaaattttgtgctttagaagacacctttaagaaaatggaaatgcaagccatggacttggaaaaaatgtttgcaaattatataccagatatataaagataccaggataccaaaccaatataaagactggcatccaaaatatataagggacatttataatttaatacaaagataaacaacttcatataaaataggcaaaagatttgatgagatatttaagaaaagaagatatatgaatggccagtaaacccatgaaaggttgctctatatcactggtcttcaaagaaatgcaaattataactataatgaaatacaattgcacagaatggccacaattaaaaagactgataataccaagcattggcaaagatgtggagcaatagaaactctcatagatagctggcagaaatgtaaatggtacaaacacgttgggaaacattttggcatctttgataaagctcagcacacacttaacatacaacccagaaatcccattccagtcaggcatggtggcttacgcctataatcccagtactttgggaggctgaggcaggcggatcacttgagctcaggtgttcaagaccagactgggcaacatggcgagacactgtctctactaaaaatacaaaaaaaaaaaaaaaaaaagccagacatggtggtaagcacctgtggtcccagctactagggaggctgaggtgggagaattgcttaaccctggggagtggaggttgcagtgagctgagattgcaccactgcactccagcctgggtgacagagcaagaccctgtctcaaaaaaagaaaaaaagaagaagaaaagaagtcccactcctggatatttacccccaaaagaaaaatatgtaattccataaagacttgtacaaagatgttcatagcagctttattcatagtaatctcaaaacttaaatgacccaaatgtctgtcaacaggacaatgggtaaatacatcatagtctgttcatccaatggaatattactcagcagtaaaaaggaatgttatagttgcatgcagcaatgtgtatgaagctcataaacctcatgctgagtaaatgaagccagacgcaaatgagtttacactgttttactccatttacatgagattttagaaaatacaaactaatctatagtaacagaaattagatctgtggttgcctggtgtcaaagcttgagaggcactcactgcgaagaagtgtgaagggatgtcttttggttgtgaaaatgttctatatcttgagtgtggtggaggttacatgggtggatacatttgtcaacattcatcaaacagtacacttaaaatgggtgaatttgttataagtaaattatgctccaataaatttgatttatttgttgaaaaacttggtgtaagggggaagtgcctaaccaatagaagacactcaaaaaatgtgttgaaggaaaaaaatcctgtgaaataaagcaggtaagagaaaataagaactcaatatcatccaaaatatagattacaaatcctaaatgagataataggaaattaatcccagtgctctgtttaaaggctcatacctgtaatcccaacactttgggagactgaggcaggaggatgggttgagcccaggagttcaagaccagcctggtcaacatagggagagcctgtctcttcaaaacaaaaatttaaaaattacctgggtgtagtggcacgtgcctgtgctcccagctactccagaggctgaggcaggaggatagcttgagcccaggagttcaagcctgccctgagccataatcactgcaccacactccagcctgggcaacagaacaagacccttcctcaaaaaagcaataaaataaaataaagaaatgcacatgactaacatagggtttattccaggaatgcaggaatagcccagtagcagagaaagcctattaaataatttatcacattaatatatcaaaagatcaaaccatttgatgctaaaatcacatttgatataatttaccatttattcataataattttcaggattcaattaattaggaataaaatacttcttcagcataatagaaaataccccagcctggtacacagcttcatactttatggtaacacgcggagattctcactgaagaaaagatgaggcaagaaaagatgatgaagaaaagatgaggcaagaaaagatgatgtctgcacactgtcagacatcaccactgtttaacatttcctgaaagctcttcaaacacagtgaaacagaaaaggaaatgcgatctaaataggaaaaattacaacattccttgttaatgacatgattttctatctgagaaaaaagacagcaagaaaatcaacttaaaacaactagaacttttaaaaagctggcaaagtgactggtaataaaatacatatgcaaaaagaaattgtgtagccaatatatcagttgtgactagctagaaaattgtaatacaaatattctcattgtgatcacaataaaatttaaagcacatgggcatttttaaatatccataatttagatgaagagaaagaaaattttgataagtagagaaacataccatcttctgaaaggatgtatattataaagatagcaatattataatgacagcaattcttctctaattaaatttattttattttgaatcaaaatggaagtgttatttgggaaggaaatttggcacaattgttataaagttacattggaagattaatcagatgaaaatagcaaagataattttcaaaaagaagaaaaatggtgggatttgttctaccagatactgaaatatattataaagctgaaactattaaaatattataatatcagagaaggaacaggtagatcaatggaacaaaatagaaatcccaggtacaaataccatcttggttcataataaagggagcatattgaatagagaggtaatgaatcattaaatgattcttggaaaactggttaactattttggcaataagtaagtaaatattcttactcggtaccataaacacaaaatcactatagatatgtacagttgctttttaactaaaaaagaactaaaaatcatatgtgaatatctgatcaaagaatggaaaaagcataaaatcaaagttagaaacaattttttaaattattgatggctttacactgtaaatattttaaaattctgcatatcaaaaaataccataaacaaagttgaaaagtaagtgacaaacttgtttttaaaaatctgcaatttatgatgacagaaaggattgatattcctcagtagacattcatcttaacaaaggcaagagtcatattcatcgtgcttatctttgtatttctttgacacaatatctagcacatggtagatgcgtaaaaatacctttaaataaattaaaaatctattaagatattttaacaatttaataaatctacacgaatatataaagagctctcacaatccagtcagaaataggtgaacacaatgagcaaagcagatgaaaaaatagttcatgggaaaataaataaaaatagtcaatacatatattagagacctcactaagaaagtaatgtatatctttaaaaacaatgaattatcacttatctattaaattgcaaaggttttgtaaagtctttgttgaaggttggtggaaagtggtttttcatacatagttgctgaaagtgttctgataataaactttctaaaaggtatttgaggaatatgtatcaaaagcattgaaagttatgcatcccattctccttataaaaccacaccttggtatatgtcccaaggaaataaagaatagacacaaagacttaaaagcaagaagagtcttcaggtaatagtgccccagaatgtgatagccatgatatccactaacagcagatttgtaaaatgaattacagtaaatacatataatggaatagccagtggccacttaaaatcatgaaagagtaatataaaataaacattagtatgatatattaaatttttaaatatattacattttaaattgataaagtggtatgtatgatatctcaattttataaacaactaaatgcttatatacacatgcaaatatatgatactctaaaatattcaaatactaccttgcaaaacatataaagaaaaaaatacagaaataggatttagttggtcttcaactttggttcactcattattccatcactgaataaacttactagtgcctactccctttttgtaatttgcaaactaggcagaattctccccattaatctatcagacctctctggagggcagagttaataaagtaccccttaaaagaaaaagaaagtgtggataagtagcttctcagaaaagatagcaggatcttcccctggcaatcatttggagataacctcatccaagttgtaggctatgaaaatcctgagagagcaacaaaattgctctttctgtgattaaaaaaaaatatcagacaggaaaagcatcaatggccatgtagatgtgaagggcttgtaaagcacacatttaaaaataaacacatggatagagacatctatttcctcgttctatctgttgagggcacctcagagcaatgacatccctgtagcagtgagcatactagtacctagactttgatttctaaataccattcttcgataaacagaaccagtcttcttgaagaatagttgattctaagattgggaaagagaaaatacaagatgagcctggagtactttattatgctgaaggtataaaagtgcttaaaaaaaaaaaactgcaggagtcaacctgaaggagttcccaatagtcagaatgaaagcaatttgagcaaaattaaaaattattaagtactggattataacctgtaaaatatggtaaatgcccacaagtccatgctaatgtaaataaacaactgaatacataaataaatgcaggagagaaggtagctcttccttacagaagaattgtaattaataagtatagaaggaataaaggaaatacaaaattaccatcaggcaaacactacagtaataatttttgcaggcaagatccactgaaagatactaaatcagtaaggaaacttgacagacaccaccttaatcaagtgatcaaggttaacattatcagtaataagacatctcaacactatgtaactccctgatatgacgcactgagaaggttataccatcacttctgtggtattcttgccagaaatgcataacttcaatctaatcataactaaaccagggattaactcaaattgagagacattctacaaaacaactgacctgtactcatatcaaaagtgtgaggtcctgaaagacaaggaaacaaagaaactcaggctgggcatggtggctcatgcctataatcccagcactttgggaggcagaggcaggaagatcacttgagtccaagagtttgagaccagcctgggcaacatggcaaaaccccatctctacaaaaaattagccaggtgtggtggcacttgcctgtagtcccagctacttgagaggctgaggcgggaggatcacttgaacccgggaggtcgaggctgcagtgacggggattgtgccactgcactccagcctgggtgacagagcaagaacctgtctcaaaaaaaaaaaaaaagaaaaaagaaaaaaagaatgagaaactcatacagattagaagagactaaggagacacaacaaataaatgcaatgtagaatcattgaagggaaaaaaatattagttgaaaagctgagatcccgccactgcactccagcctgggccacagagcgagactccgtctcaaaaaaaaaaaaaaaaaaaaaaaaaaaaaagaaaagctgataaaatttgaataagccctgtagtttagttaataatagtgaagccatgttaatttcctgggtttggtcattgtgctctggttatgcaagttgttaacattagaggagactgagtgaaaggtatgcatgaactctctgtactaattttgtaaattttctgtaagtctaaaattattcataatatgcaaaaattaaacaaaaaataaaataaaataagcacatggaatgagactgtcccctgggtctctgtagaaaccaggtcaaacatcccaaatgctcttttacccccattctgagttgggccagaatggtcagaataatggttcccaatgtaccttgataaacacggaaactctcaggaccgagtcctaaggttctctgattcaataggtttggagtggacttgagaactgatctttttaataagggcctcagtctgtggaactattggcctcatgtgccctgtggataatcttggctgttggttcatttttcttaactgaaaacagtggcagaaactatggggatttttaaatctctaggctagaacattaactttttaaaaattcagaatagtattttatttgcctcaagcctgtgaatggggatcccacaaatcaccccccactgaagacaatgcccataacaaggtaacctacccatgagcttctgagggatttaggaattgtctaccatctcctctctaagaagggctcccacaatatatccccttctgcttgcttctaactccctatcacctgctaaagaaggacctcaccttttaatcactttcattgccaaggggcacaaggagccccaaactctgtcacctaggaagagcttgacctcatggtttccacactgtgtgcttttatgtccctgctccaggagatgatggacattgtcaaagccatctatgacatgatggggaaatacacatatcctgtgctcaaagaggacactccaaggcagcatgtggacgtcttcttccaggtaagtgcacacaccctgcacatgagctgtaagcccagcctagatcaagtcaacccacgagcatctgagcaaatgatttgtgtccaaccctgtactaagcatggttggtaacagaaaagaattataagatacattgtcctcaagaaacagatgatctccttaagctgcaagtgtacatgacagaagagaacaagaaagtatattattaaacgctagtggtatagtatgaactctaaatccataaaaatttggggatcagggtaaacacgaaagacttcattaattacaactgtggaggtgttaagcatttgtgtctgggaagtaaggggaaataagattggaaactaggatagggccagattatgagacctttaaatggaagagtttggccttgctctggtacaggatgggcagctagtgctgatccttgactaagggagtggtataatcattggggcattttaggaaaaaattaatctagcggtggagtatcagagaatatcaagagttcactctagttcaacctcccactttgcagatgggaaaagagagtcctctctggccttgtgcaagtttgtacagcaagtaacaggccagaatcagaacctcttttgcccagtgttctgccagatggacagggtagcagggagtctacagaagaagcagaataagccagcagtgaggtgatgagtgtccagagcaagtcttttgatttaaggaagctcatggggctcaaagtgttgtaatcaggacctaattggagttgtctggccagtgaaagacaactctcattctcagggcaaagttggttaatgaaatgaatgaaatgagctccagctcgttactctgagctccagcaagaaagcaggggagtaagctttggaatggagatcaccagattctgtaaagtgctttctgttatgtctttcagaaaatggacaaaaataaagatggcatcgtaactttagatgaatttcttgaatcatgtcaggaggtaaggagagatctcagggcacaataactctacatctgggaaaggaaacctggggcctggggacctgcagaaggaaggtgatgagaaacctgcacatacctgcaacccctcccatcagagccaacaacaccagcaacaactgtgaagtccacagttccactcctcaacctgacctgcagttggtcttggctaagcacaagactgaacagagagcctaagtaggggtctgggggcatgtgaaaactcagagggggtctctgtgaaaatagacttcccgagagggcaacaccattattttttagcctgcctctggcttgatgacccatttcccagactacaaggaagcagctggggggaaaaaaacctacaattgtgtgattctcaaaccacagtgtgcataaaaattgcctggaatgattctgaaaatgcatatttccaggcctcaatcccagagactctagatctgggtcactttaacacaaatgtcctggaccaatgcttctaacactttaatgtgtgaaacaatatccttgatgattttgttaaaatgcagattctaattccataggtctggggtagggcctgagatgttacttttctcacattctccccagtcacactggtgatgctgatcctgggaacacaactttcattaagtctaaccaatagaccagccccagagtccaccagagactgaactggaaataattgcttcatctacttttgagaaatccatttgtacccccacattattttagaaatgttcagagttactctgagctccagccaagaagaatagcaaatgtaagaaagccggggagaagttcctagcagatactgagcccccatcaagtttcaagcacatacataaacatcacagccaccctgttatgtagatgtcctatgtgcagggtgatatccaagatatttaacaactagaatggaatgaacactgacccccttgggggtgagttctcactgttaattcccttgagagctggttgtaaaacagcctggcaccttccccacctccaaccttgattcctctcccaccatgggatctctgcacacccagcttcccttcacattccactgtgagtggaagcagcctgaaaccctcaccagatgcagatgcccagctgaactttccagctgccagaataatgagccaaataagcctatactgacattaaccttttcatttctgatattgataatttgaaaagcagtcttaataagcatttatctactttattgatttttttgaaagagagcgctttggggggttttcttactgtatgtctctattgcatgttctgtattttacatttttctattatttcttctctgaggtatagtattgaatgtagaaaaatcctcaaatgttcggtattaagcaatacacttctaattcatggttcagagaagaaaatatctcgaataaaaataaaataaaaatatgacttatcaaaatttgtaggatctaaagcagtattccaggaatgcaaggttggtttaacattcaataattggtcagtgtaattaatcacattaatagaataaaaagagaaaaaatataatcatttcagtggatgtaattgttcagagcttcttaaaagaagcaactcactattttactagatgatttgtttcttctgaattcctctttaaggctacaggtggtgcttcttactttgaactgatcactttctaggtccccacccttacttcttgtttttcatacccttgtagagttttctccatataggaaacccatgcttgacatttgctcaccagagttacagagctctcagggaggagactcagagttctaaccctcttgccctccttttttcccaggacgacaacatcatgaggtctctccagctgtttcaaaatgtcatgtaactggtgacactcagccattcagctctcagagacattgtactaaacaaccaccttaacaccctgatctgcccttgttctgattttacacaccaactcttgggacagaaacaccttttacactttggaagaattctctgctgaagactttctatggaacccagcatcatgtggctcagtctctgattgccaactcttcctctttcttcttcttgagagagacaagatgaaatttgagtttgttttggaagcatgctcatctcctcacactgctgccctatggaaggtccctctgcttaagcttaaacagtagtgcacaaaatatgctgcttacgtgcccccagcccactgcctccaagtcaggcagaccttggtgaatctggaagcaagaggacctgagccagatgcacaccatctctgatggcctcccaaaccaatgtgcctgtttctcttcctttggtgggaagaatgagagttatccagaacaattaggatctgtcatgaccagattgggagagccagcacctaacatatgtgggataggactgaattattaagcatgatattgtctgatgacccaaactgcccatgtcatttgtttccagaaacgaggaccaataattctctcacactggcatttgtgctggtagtacaagtcctttaatatgtccaggaagggagccattgcccagtggtccatatctccaccacatcccctgcttgagcccagcgctgcatgtccctcccaagaagtccagaatgcctgcaaattgctgtaattttataccatgttctaaccaataaacagaactatttcttacactctcaatcacttcttcatgactccgttaggtaagagaggtaagctgtgaaaagggaaggctagtccattcatttgacacccaattattagtgcagttgtccctccatatgtgtgaaggatcagtcccaggactctccataccaaaatctgcagatactcaagtcccacagctagccctgagggactcgtgttttcagaaaatttggcctccatatatgcaggtttcacatcctataaatactgcattttctatcacttttggttgaaaacaatctgcatgtaagtggacccaataagtttaaactcatgttgttggagggtcaactgtacttacgttgtgccaggcctgtgccaggcaatgacttcatcctccccagcccccaagccttccccagcaaacatccaatccaaatgcaaatactgtgaccaaatgcaaatgcaacttcgagacaagacccttcacaacactttgcttccaacaagattgccacttctaagaccctctgatatggaaagcctggagcccctgtggtgtgagtgggagtgcagagataaagaggatgacggggcctcctgctgagagattttaggctctagaggaccatcaagcggcttcagcctataaccagcaaatgattactcatgttgaacactgtgggtcttagtttccccatttgacatcacatttgaaagactaaaagctaacagtagcattcttggaaggaaaacaatttactgaaaccctattttgtgccaggtgctgcactaggggctttatatacattatcttatttcatgctcatgtggagcattccagatggtagagtcctggttgtactgatgaggttgctgaagctcagagaggtaagggggacctgcgtaaggtagcacagctgatagggactccatagggaggctaaactcttctcgctctatcatagacccttcctacaaggggattttgcctcaccccaaggatgaggatacttcccactaatctcattcatctgaagtcagttcagagaggcattggtgttctttgagtctgtgtaacagatggagaaacagatgcagagaaggggaatatctcaggcagccacagtcaccggcagggggaggccacaaaaacatctcctgcattcatgacacatcccactcagatggccattggctgctgcctcttatggttggaaattgtaagtgtgatgatgagaatttgttggatagttcagacctgttcctctgggcttcctgcatgtagccatgtggttccctaaggcttctgggcatgtggctggtccccagcaaagcatctacttaggcccaagagaggatctgtcctagagactcttcccatatggggtcctaacctgcatcttgaggctttatgatgtctaggccagtgttccctgccctggctgcacatcagaatcacctgggaactttgaaaaatgtgaacatctggatgccacagcagaccaactgaaggaacatccctgaaggtgg

SEQ ID NO: 297 - DNA, 1223135 bp, Homo sapiens
  source 1..1223135: mol_type = genomic DNA
gcctatattttatttaactcagcaaaaagtccttcttatttcatcattttgttcttacccctttttgtttgagttttagatactttctaggcatattcctgcaaatataatacctattaggggaactctgcatgatactaatgatgctcaatttttttctgttgacaggggagccttagcatcatcaaatctaaaattccaacatactgctccatatgctgttgaagaagggagccaacaaaaattgttttttctacctgttgacgtgtcaagcactaactgtgggtactcatttattttattcttttgtaaatcacagccaccattcattatttactaggttaagatgaatagacactgaatcaaagttattcatcaacaaaaaagaacagttactaatggaaagttattaaaataagttctataagagtacaattttgaggtttattttttgtatttttattatttgtgcgaagaaccattattgagtttgcaagataagatgtatttgtattttctagtgtctttttatttataacaacacttttttggcaatcagtttgtagctgtgcccttatttttatagatagtttgccatttcttgggtttaatgtttaacaaggctatagaagtttaaaatagtggacaaatgtttgtgaatacacttttaaaaaattgttttaaaagagaaaagcggtcttgctttgttgcccagactggagtgcagtggcataatcatagctcaccgcaagcctcaaatttttgtgctcagatgatccttttcatctcagcctcctgattagctgggactataggcgtgtgccaccatgcccagctaattttgaaatttgcttgtagagatgggatctcactctgttgtccaggctggtctcagaattctggtgagtgatcctcccacagtggacttccaaagtgctgggattacaggtgtgagccaccatgcctggccccatgaatacactactaatattatttgtaaatatgtattttataatgtacaatgcttggaaaattttcagagtattctagtttaaaaaattttttctaattctgtaaattctattacaagtatgttgtttattacaactcattacaactacctaaattttaggtgttaactgtatttaagtaaatgtgttatttttgcatttcatagccagaaaatactgatgttcacttaaagatattcagcaattaaaatgttaaaacttgtacatgcattcattgattttgttgtgcttatgtttagcaatttttaagaagcttttaaaatataatatagacatagttcagaattttgatgtaatagaagcaattccctctggctacaacagctgcctgcctgctggccttgcttttacctgttttcattgcattgagcaccatccagagctatctgccatctagaaagtactgtaagatttaattaattacaaaatttcttggaaaagacctgtaacatagacagtagagttataaacattttattttgcttttattttttctttttgaaatacaaaatgtgcacattgagtttacacaaacacgtgatggcaaatttcagtgtacatgtattgtactactcttaatttctacactggtgatagcagggcagctttcaacatcctatctctacaccagaatagatacctgatttattgttgcaaagacagttgcaaatttcctccttctgtagcctcttggtctttgtgatatttctacaaaacagggacgatgtgtgtggctttagtaatgtggcaactttacagttttggctaagatgattaaaaataatctgaattatgatgagctaaatcatactgtaatctggattagttgttgagcacttattttctactaaatcttggtagtagttgtcaatgtaatggaaccactggtgctttcaaagtgaattttgcttgctaattttgcttgctgtttgttcttagtagacagtggggtagtcaaggtttctttctttgtccctgaatggcttgtaatataaataaacatgctgtaaggaagtcaggggaaagaggacagatttggcctttaatgctgttaggattacttgttattaagcattactatatactggaggatagatatcctgaccctttgcatatgtctgtaaacatccttgttttgtttgatgccttcttcaacttccacttaatgattgatactaatgattgatacaatagaaaacagcctgtaagaaagattgaacaaatccaaaattattatataggccttggctgtaacatattatggaaaattaaatgcttattaaaataagttttattaggcatatgctgatatctgataataaactaatttttaaatgtttaataatttttaaatgtttaaaaatgccagataaaactaatttctaacagaaggtgggaaggccatagaaactggaactatgtgtttttttaattgttgtaatcttgtttccttaaagtatataaatggaatttaaatggaattacagcattcaaacatgaaaattaatttaatttctggaaattaaatgcagatgtcactatattagaaaaccattcaaaatcctaggactgaatacatacaaatgagtagcaaaaaacactgatattttaaaatcactgatatgtgaaagcctcaataatcccatggctaaggaaccaataaaactatatgccagattctattacttttgaatattcacagagtatgaaatgagttagaccatcccctgaactcagtggcattatgaaaaggatgcaaatttataactgaaagctcaaatcttttggggattgctttatattaaaacaaagcttgtttgcataatatgcttcagtgtcaagctgagcaatctatgctaaaagtggtagctccaactttaagggtggtagaatagttcacatttgtctgttggattcaggatctatttgacaagttaaatcacattttcaaagagctgcatggagcgcattatgttttcatcctgtaagggagaaacacagagcgattaaattcagcatatctgcaaggaaaagtacactattttgcccctgagtattgcctcctcccatcaaccacctcaaccacctatgccaaaagctcaaatattaagtgtttgcaaatgtaaatgccattctattctatccattttccacatagatgactatgaaggacccattttatattttgtggagtctattgaccaggcattaaaccactttatttaaatctttacttggtattaatagaggatatttctcaaatcataatgccaaaatggaaactacagaggtgcagaggtgtgtcaaagcaaatgagaattttggcattctatgtagatcacaggccaaatcacacagacttttatacaggtacaaggaaaatttgtgtgtatgagccagcagttcatgaagattggaggctggcgcataggaggcagggtggtggattaagaggtaacatgtttgcagtaatcatctctctttctgtctgctagttatggctaaagctgcatggcctgaaggagcctttaaaaatgaatggtctctcaattacagagaaagaattggggagcagaaaccactgctcagtggctgtgttcagtttagcatattctttagaaatgagttaggggacagactttgggcattattggagcacttgtcagttgcatgtgaatagcacttactgagctgtttatggtagtggtaaatggtggctgaaccaataatggcttccactgctagaaaccaagtaacatcaccgtcaagcagcttaatgtcaccaaattaattctctcaaagaccactgcatggaaatccaagttgagagacaagcagacatccagaaaagtaagaacaacaatttaaaaataaagagaaaaactaaagaaacaacggatttctttgttttcaggattatttgaaaaattctttttttctttttttagttttgaggcagagtctatttctgttgcccatcattctggagtgcagtggcacaatcatggctcaacagggatcaagtgatcttcctgcctcagcctcccaagtagctgagacttcagccacgtgccaccgtgcccagctaacttaatttttttttgtagagatagatagggtcttgctatgttgcccacattggactcaaaatcctggccttaagttatcttcccgcctcagcctcccatagtgctgggattacagttgtgagctactgtaccaggccttaacaatttttaactgtggttctgcccacacatcaagtcaaataattctaagtaagctaacactggtttctttgataacaggctactacctggagttctcttcagagaaaattttccactgtttattttttgtgactgaagaccattagtgagttcagtcaaagagccatttcttgtccacatacactaaaacaatgacttttctcttagaaatcagatagaagcttggcctgttgtgatgccatacttggctatctaggaattctaatgctgtggagatatgatagataatatatgagtgatgctaagttttggcaaagagcaattcaaatctcatgtatgttttatcctccatgaatactctctaaggaatttgggaatcaacacagtacatgtacaacttttgtatccccagggtttcctccatagcctgactcagtgggcactctaaatgttgattatgtaattggtgcttgttttcagagtggtaggcttatgctgcatgttgtagaagtggtaaacttaggcatatgatctctatatttcgcccagttcatggtagctagctgctaatactcagtttagctgttatgatagctgaattgatagttattacactttcattacttactttttggcagctttcaatgaactcatctatggtaacaaccccatctttatttttgtccattttctgttcaggaagaaaacaaaaattgtatttagacttatcccttaataccctcacacctggaccaaatgagctgaagctgataaaaagaaaacctagctgcttatttatttcacgtggaggaactgtttcagagcaggaaccagcagttttttagagataaaaatgatagggccaaatgcttctggcttttcccttttcaatataatgtggtgaagatgtagagtcactctgtcctaggtaaaatcccaccttctagatgtgacagagcttgcgcaatttgctgaaactttcagagcttgctttttgtctcatctgtaaaatgagattaatgaggatttataggattcttgtaaaaactgaatgaaaacaaaacttgtgaaacatgagaactgtttagtgttgtatcttggatttagtgaatgttcaataaatgcagttatcagcattgtaaattcaaaaccaaagctattaaattaataggatgctaaatactgttttgtttcagtaaaaattattttcctttgctctcttttgaatcatcgtggtgcatggcaaacatcaggaaattttctcctaacttcatgccctcttgacttctgttttaattcctacctgaaaaaatgtttcaacgtgttgtctgggagcatcttctttgaggacaggatatgtacatttacccatcatatcgtatattgctttcattatatcaagcatttcctgaaaaataaaaggcactcacgtgaggctgcacacatgtatgaagaaaccagtctaagaagctctgacagatttttcctactcaattttaaatttttgactttttgtttgttggattctttgttagacgactgttggttgtcccaaaggaaaaggcaacaaacagctttctgccttaagagcagaagaatcagaatttaagaatgaattctgatctcttggtttcaaaaggaagcaaatttccatgtatctaccatagtcaggaaaagaatatgctggcttaatgtttggatttctatagactttaagtagactatgtttatttaattgcattatatatcttatgtgttgatcatcagtttccatctattgagaatcaaatatacggcacatcgtatattgagaaaaaacaccatttagaattagtgaaattaattggtaagtcttaaggttcattagggtttttgttgtatttttcctactgtggctttaacttaagtcacatgtgaagactagtcaaaaaattttgaccctgggaaacacctttaaattttgttattaactttttctctaaaacagtctaatttttgccttaccactttcattcttatgagagtaaaaataatctctaataacttaaacatttagatttattgttgcacatttgtttcacgtgaaagatctctcaattaggttaatacagagcgaatatatatttacttttaagagtattcaattataaatgatagagtaatttgtaaacaggtgaaaccttttaagatgttttaagcatagataagtagcaagtagtttgttagacacaggcagaattcttgagatgtgttaaacacagaggtaagaattgaagaacaagagatatttaaggtatcctaagtatctgggtaataaatattcatgatataaaaatatacaagaagcactatttaggatatgctccatatacatgaacacaatagccataaggtcttaatttggcacccactagtgatacctattctggccccaggtgtcctctgtgcaagaaacacaaatgaaacccattactacttatcaggctatactcgtgacctggcacacttgcacctgtgtctctccagtagcgcaagttcatgtcatttgctgttggccctgggcaccttttgtctgtggggcctcttgctcaaaactcaattctggggaagtctcgtgaggcaaagagagacaggacataggcacactgagaatgcccaggatttagggagtggtctttcaaccccatttgcagcctgtcctgcgtggttaacttactccatccctttctttacttctcgctgtgttttaaattggtttaataaactgtgtaatacgagtatcttaatttggtctgtgaaccttgtttcctggatagtctgcctcaacgtgcatttggagaccccaccattgcgtcaggtcattccacaatccccatgattgtaaaatttcatttccttatggatcacatgctgtggggaaaagaaaggcttcaggctaaatgttgaaacatgggttggatacattttctttctatctgattccaaccatgatctttattccattcacagtatttattaagatgccagcaggaaacaagggtgtaatctttatgtgttatatatttactttggagcttcaccataaactacttctatcccaagtttttaattgtacatctttcttccactacataaaatattttggaatttcctcaaaaaaacttttcaaattaataattgcaattaatattttaaagttaagaaatgaaaatggtccaaattactgtgatgttggtgaggcatcccttacctctttagtgatgtagccatctttatttatgtcatacagattaaatgcccaattgagtttttcttgtactgtcccccggagcaaaatggaaagacctttgatgaaatcctgaaaagaaataaaaattcaattttatatgacatttttaaaaaaacaaaaacaaaaaaaacaaatgatgtaagtaagggctacaaccctctggatcttgaacatttagcaaaatgattgatgtgttattggttgtctagttttcagacttctctgtgggcataaatcactccttagtcttaacattttcatattctaattggaaactgagttaaatcaatggtcatactggaaattgtaccagtgcgtacccacacagctagaggcttgagtataagtggtattggctttccactgcaagtgcacatgatttactaaaagaatctaataatagttttttcaaaaaaatacaagtgcacacataacacacttcaatgaaaaaccgtttgctaataagaaatgtggctgtccataaaagataaaccaattgtggtctttaattagaaatccagttataatttacatgtggacagtgggtaagagcatggaactggaaaggacagactgcctggattcaccctccagctatattactggatggctttgtgtcttcaggcaacttaacatccctttgcctcaattttcgtatctgtaaaatggagctaataatagtatctacctcttcacaattttatgaggattaaaaaagaggctgcttataacagtccttggcaatgacattggctatgtaagtttttgttaagtaaatggagccctcagtttgtatcctggttagattgcattgcagactggccagattaacttgattaaattcatttagtgtttttttttttgtttttttttttttttttgagatggaatctcgcactgttgcccaggctggagtgcagtggcacaatcttggctcactgcaacttccacctcccacctcccaggttcaagccattcttctgcctcagcctcccgagtagctgggactacaggcacccgccaccatgcctgactaatttttgtatttttggtagagatggggtttcaccatgttggccaggttggtgtcgaactcctgaccttgtgatctgcccaccgccgcctctcaaagtgctgggattacaggcgtgagccaccacgcctggccagatttcttgttgttatgtacagcagggttaacgttacaatgtgctgtattcagtttataatccacttttaggtaggaatgaaagcagaggggaaatccaaaagtcttctgggtgaatttgcattatatctccctttctcacattccttccttttatagctgtatttctatctgaatttctcaaaatgttttttcttttttaaataagtaacatccatatagttcaacatttaaaaattgtgtaagctgcctggtgaaaaatctttcttcccttcctggacccagccacctgttcctttcactcatagactactggcataaatagtttgtatttacttccaaggaatttttgtgcatacacaagtataagatatatttgttttactagctaacagacttctatacttttttttccacttaagcataaatcagggaaacaatttgagtttccattgtatatgtaaatacatcgtagtttatttaaccaaattgttcttttacattttttctcatcattatttctaggtattttaatatttctgttgctgttgtaaatgagatatttttttctatcatatattctaaactagttgtttgtatgtatgaaagccattgatttctgtatgataattttataccctgtcaatttgctgacatacgttggttttcttctgggttttcatgtgtgcaatattagctgcaaatggaattaattttacctttttttctaatttttatatgtttacttttttctaattatatggcctaatatatatagaacagtgttacataatgaaaatgataatagatattcttagttttttcttgaacttgagaatatttcaattcgcttttaagcatgatacttacttttatcatggtaaagaattatacaacccttccacttaagcaaatttatcaagaatggccacagaccttttttagcaaaaatgaaaaagacaaaaacagaaataattgtcaaattcatattgcaagggaccctgaatagcccagtcaattttaagaaagaaaaacaaacttggaggactcacactgcccaatatcaaaacttagtacaaagttacattaatcaaaacagtgtggtactggcataaagacagatatatagaacagtagaatagaattgagtctagatataaaccagctgtctgtggccaattgattttcgataatggtgccaagaccattcaatagctatggaaagaataatctcaatatatggtgctgtggcaactggatcaccatacttagtttgcttcccattggcatgaagggtagaatgtcaagtgagagaaaaacaagattccagagaaagccacaaggaattccaatatttggcaggtacagagaggagaagctggcaaagcatcttgaaaagaagttgctaaagaagtgagtcaggagaacagagcatttccctaggaaaggattgttcattttgctccaaggttggaaaaatgttcactggaccagcaacatggaggtcaccagcaagtgatagggaacggtccagtggagtaggagtgaagagtaatttttaatgaggagcactttgaatactgaagagaagaatctaaaaagagtaagagtcagaaatgggctgtgctcttgagaaggtggggaggatccagaacatgggtagatgggccgatctgagaagggagttgatacatgagacagaagaacatggtgtggatgccagcagctgctttgcaggtgggaagatgactgtgtttctgtccgatagctttagtgagtgtgagctgtttgagagtgaggagcctggtagaagaggtaagaatctgaggtttgaggagagaggcagaagctctgatactaagcagtaagatgacatgcaaattagagaaagggagacctccctcaaattatttccctgccatattttagaaaattatttatgacatagaatgtagtttagttaaaaggtaatgacagcccttggaggtatgagtgtacatcttgcacaaccagcaggctggggatcatggctcatgcctgtaatcccagcactttgggtggtggaggtgggaaggttgtttgagtccaagagtttgcaagcagcctgagcaacgcagccagatccaaattaacagcaagaaaaacaaattaactgggtatggtggtgcacacctgttgtcccagctacctgggaggctgagatgggaatcacttgagcccagaaggtcgaggctacagtgaactatgattgcaccactgtgcttcagcctggatgacagaccaagactctgtctcaaaaaaaaaaaaaaaatccttagctttttcagaaggcataaaatatacattgcagaacatagagccttattcaaggaagattgctgagcagttttgaaaggctagatgagattgattgttatcaatgtaaacgatatttttaaaaattcacagcgtagtaataatatgtcattaattgtaaggggagctggccacagggtctttgaaaacatgcttagagtattggttctcaaaatataatgtgcaacacagtcacctggggagtgtgccaaaagatttatgggacctactccaagaattatgattcattaggttgaagtgggaccccaaaatttacatgtctgacacattccaaggggaagcctgtactgcttccagggatcacactttgagaatcactggcctacagcactcatcactggcattgacctcaccaccacacaaaacagcagagaaacaatgaaagatttaaagatagcacttttggggaatccccccaagatggctacataggaacagctccagtctacagctcccagcatgagcaacgcagaagatgggtgatttctgcatttccaactgaggtaccaggttcatctaaactgggacttgttggacagtggatgcagcccacagagtgtgagccgaagcagggtggggcatcgcctcacccaggaagcgcaaggggttggggaattccctttcctagccaagggaagctgtgacagatggtacctggagaatcaggacacttcctgccaatattgtgcttttccaacagtcttagcaaacggcacaccaggagattatatactgcacctggctcagagtggcccacacccacagagccttgctcactgctatcacagaagtccgagatcgaactgcaaggcaacagtgaggctgagggaggggcgtccaccattgctgagacttgactaggtaaagcagccaggaagctcaaactaggtggagcccactgcagctcaaggaggcctgcctgcctctgtagatgccacctctgggggcaggtcatagctgaacaaaaggcagcagaaacttctgcagacttaaacatccctgtctgacagctttgaagagagtagttctcccagcatggagtttgagatctgagaacagacagactgcctcctcaagtgggtccctgacccccgagtagcataactgggaaacacctcctagtaggggcagactgacacctcatacagccaggtgcccctctaagacaaagcttccagaggaaggatcaggcagcaacatgtgctgttctgtagcctctgctggtgataaccaggcaaacagggtctggagtggacctccagcaaactccaacagacctgcagctgagggtcctgactgttagaaggaaaactgacaaacagaagggaatagcatcaacatcaacaaaaaggacatccacaccaaaaccccatctttaggtcaccatcatcaaagaccaaaggtagataaaaccagaaagatggagagaaaccagagcagaaaagctgaaaagtgtaaaaatcagagaacctcttctccaaaggaacgcacctcctcgccagcaatggaacaaagctggatggagaatgactttgatgagctgacagaagtaggcttcaaaagatcagtaataacaaacttctccgaactaaaggaagatgttcgaacccatcacaaagaagctaaaaaccttgagaaaagattagacgaatggctgactagaataaacagcgtagagaagaccttaaatgacctgacggagctgaaaaccatggcacaagaactatctgatgcattcacaagcttcagtagccattttgatcaagtggaagaaagggtatcagtgattgaagatcaagtgaatgaaatgaagcgagaagagaagtatagagaaaaatgagttaaacaaagcctccaggaaatatgggactatgtgaaaaggccaaatctacgtctgattggtgtacctgaaagtgacggggagaattgaaccaagttggaaaacacccttcaggatattatccaggagaacttgcgcaacctagcaagtcaggccaacattcaaattcaggaaatacagagaatgccaccaagatactccttaagagcaattccaagacacataaattgtcagattcaccaaagttgaaatgaaggaaagaaagttaagggcagccagggaggtcgggttacccacaaagggaagcccatcagactaacagcggaactctcggcagaaactttacaagccagaagagagtgggggccaatattcaacactcttacagaattttcaacccagaatttcataaccagccaaactaagcttcataagtgaaggagaaataaaatcctttacagacaagcaaatgctgagagattttgtcaccgccaggcctgccttacaagagcttctgaaggaagcactaaacatagaaaggaacaactgataccagccactgcaaaaacatgccaaattgtaaagaccatcaaggctaggaagaaactgcatcaactaatgagcaaaataaccagctaacatcataatgacaggatcaaattcacacataacaatattaaccttaaatgtaaatgggctaaacgcaccaattaaaagacacaaactggcaaataggattgtcaagatccatcagtgtgctgtattcaggagacccatctcgcctgcagagacaaacataggctcaaaataaagggatggaggaagatctaccaagcaaatggaaaacaaaaaaaaagcaggggttgcaatcctagtctctgataaaacagacattaaaccaacaaagatcaaaacagacaaagaaggctattacataatggtaaagggatcaattcaacaagaagagctaactatcctaaatatatatgcaccaatacaggagcacccagattcataaaacaagtccttagagatctacaaagagacttagactcccacacaataataatgggaggctttaacaccccactgtcagcattacacagatcaatgagacagaaagttaacaaggatatccaggacttgaactcagctctgcagcaagcggacctaatagacatctacagaactctccaccccaaatcaacagaatatagattcttctcagcactacgtcacacttattccaaaattgaccacatagttggaagtaaagcactcctcagcaaatgtaaaagaacagaaattataacaaactgtctctcagactacaatgcaatcaaattaaaactcaagattgaaactcactcaaaactgcacaactacttggaaactgaacaacctgctcctgaatgaccactgggtagataatgaaatgaaggcagaaataaagatgttctttgaaaccaatgagaacaaagacacaacgtaccagaatctctgggacacatttaaagcagtgtgtagagggaaatttatagcactcaaagcccacaagagaaagcaggaaagatctaaaatcaacaccctaacatcacaattaaaagaagtagagaagcaagagcaaacacattcaaaagctagcagaaggcaagaaataactaagagcagagcagaactgaaggagacagagacacaaaaaacccttcaaaaaatcaatgaatccaggagctggtgttttgaaaagatcaacaaaattgatagactgctagcaaggctaataaagaagaaaagagagaagaatcaaatagatgcaataaaaaatgataaaggggatatcaccactgatcccacagaaatacaaactaccatcagagaatacgatgaacacctctatgcgaataaactagaaaatctagaagaatggataaattcctggacacatacaccctcccaagactaaaccaggaagaagttgaatccctgaatagaccaataacaggctctgaaattgaggcaataattaatagcctgccaaccaaaaaaaagtccaggaccagatggattcacagctgaattctaccagaggtacaaagaggagctggtaccatttcttctgaaaatattccaatcaacagaaaaagagggaatcctccctaactcattttatgaggccagcatcatcctgataccaaagcctagcagagatacaacaaaaaagaattttagaccaatatccctgctgaacatcgatgcaaaaatcctcaataaaatattagcaaaccgaatccagcagcacatcaaaaagcttatccaccactatcattttggcttcatccctgggatgcaaggctggttcaacatacacaaatcaataaatgtaatccatcatataaacaaaaccaaagacaaaaaccacatgattatctcaacagacacagaagaggcctttgacaatattcagcagcccttcatgctaaaaactctcaataaactaggtattaatgggacgtatctcaaaataagagctatttatggcaaacccacagccaatatcatactgaatgggcaaaaactggactcattccctttgaaaactggcacaagacagggatgccctctctcaccactcctattcaacatagtgttggaagttctggccagggcaatcaggcaggagaaggaaataaagggtattcaattagggaaagaagaagtcaaattttccctgtttgcggatgacatgattgtatatttagaaaaccctgtcgtctcagcccaaaatctccttaaactgataagcaacttaagcgaagtctcagggtacaaaaatcaatgtgcaaaaatcacaggcattcctatacaccaataatagacaaacagagccaaatcatgagtgaactcccattcacaattgcttcaaagataataaaatacctaggaatccaacttatatgggatgtgaaggacccttataagggtgtgaaggacccttataagggtgtgaaggacccttataagttcacccttatgtgaactacgaaccactgctcaatgaaataaaagaggacacaaacaaatggaagaacattccatgttcatggataggaagaatccatatcgtgaacatggccatactgcccaaggtgtaatttatagattcagtgccatccccatcaagctaccaatgactttcttcacaaaattggaaaaaactactttaaagttcatatggaaccaaaacagagcccacattgccaagtcaatcctaagccaaaagaacaaagctggagacatcatgctgcctgacttcaaactatactacaaggctacagtaaccaaaacagcatggtactggtaccaaaacagagatatagaccaatggaacagaacagagccctcggaaataataccacacatctacaaccatctgatctttgacaaacctgacagaaacaagcaatggggaaaggattccctatttaataaatggtgctgggaaaactggctagccatatgtagaaagctgaaactggatcccttccttacactttatacaaaaattaattcaagatggattaaagacttaaacattagacctaaaaccataaaaaccctagaagaaaacctaggcaataccattcaggacataggcatgggcaaggacttcatgtctaaaacaccaaaagcaatggcaacaaaagccaaaattgacaaatgggatctaattaaactaaggaacttctgcacagcaaaagaaactaccatcagagtgaacaggcaacctacaaaatgggagaaaattttcgcaacctactcatctgacaaagggctaatatccagaatctacaaagaaattaaatttacaagaaaaaaaaaaacccttcaaaaagtgggcaaaggatatgaacagactcttctcaaaagaagacatttatgcagccaccagacacatgaaaaaatgctcatcatcactggccatcagagaaatgcaaatcaaaaccacaatgagataccatctcacaccagttagaatgacaatcattaagaagtcaggaaacaacagatgctggagaggatgtggagaaataggaacacttttgcactgttggtgggactgtaaactagttcaaccattgtggaagactggtgactcctcaaggagctagaactagaaataccatttgacccagcaatcccattactgggtatacacccaaaggattataaatcatgctgctttaaagacacatgcacatgtatgtttattgcggcactattcacagtagcaaagacttggtaccaacccaaatgtccatcaatgatagactggattaagaaaatgtggcacatatactggattaagaaaatatggcactatacagccataaaaaggatgagttcatgtcctttgtagggacatggatgaagctggaaaccatcactctcagcaaactatcgcaaggacagaaaaccaaacaccgcatgttctcactcataggtgggaattgaaaaatgagaacacttggacataggatggagaacatcacacacgggggcctgatgaggggtcagggggatgggggagggatagcattaggagaaataaataatgtaaatgacgtgttaatgggtgcagcacaccaacatggcacatgtatacatatgtaacaaacctgcacattttgcacatgtaccctagaacttaaagaataataataataaaaatataaaataaaaataaagatagcacgtttaagtcaagtgtggacttgtgttgtttgcctccctagccctagtaggtcccaaatttccatttggtgctccatgatgttctgtggaagttcacttcatctctgagtctagtgatagagccatgacctgggcgaagtcaggaagcacattttatccctttggccggacaactggatttgtggttgccatttgactaaacctagtccaggtctaagaatgactccccagactcagactcttgctaggaatggtaggacagagatgtgcttctttccttgctcaacaggagcaatgaatcatggagccaaggagctttggcctcttcttgcagccctacagggtcccacccttaggttgtagccagccccatctctggcctttttgttgctgtgaaccaatgaaattaccatttttttttgtcacttggtgtatccttttctagtatttgtgaacaaaagtatcctgattcacatggtgacatctaattcacatcttcttgaatactgtatatcctgaaacaatttacattaaaagatagctatggtcttagagcacctctctctttttatcctgtgggatgatatcagtaaagagttactcaaaacaggaatgatatcttttcgtgcaaaagaaaaatgagaaacttaatgtggcttataagacttttgctccgtgcttttctgagttgtaattgaagtctcaagtaggaagtgacaaacttaacaacaactctcaatgagtactttgcacaattactttacttgtaaatgtgaaaggaggttatatctgttccctaaagtacaaaaaatgataaaggggtggagaggtctgtaccgaattctggtttccattctcttattatcaaggcaaaaggagaaagacatagagatttgactttataatagcctagacttgttcagttgtggattctgttcatctgccaaacctttaatgagtgcctcagtgctggccactatgctggggacaatcctcctgactcccctgactccctgccaatcaaagactgctatggcttagaatgatgcatttgcatgtagttgccttactgggtaatgagatgaccaatgtcattattaactggctttgttagaaaaattcccccaactagtgtaaattagttcaaccattgtggaagactgtggcgattcctcaaggatctagaactagaaataccatttgacacagccatcccattactgggtatatacctaaaggattataaatcattctactataaagacacatacacatgtatatgtattgcagcactattcacaatagcaaagacttggaaccaacccaaatgtccatcaataatacactggataaagaaaacgtggcacatatacaccatggaatactatgcagccataaaaaaggatgagttcatgtcctttgtggggaatgaagctggaaaccgtcattctcagcaaactatcatgagaacagtaaaccaaacattgcatgttctcactcatagctgggaattgaacaatgagaacacacggacataggaaggggaacatcacacaccagggcatgtcggagggtggggggctaggggagggataatattagcagaaatacctaatgtaggtgatgagttgatgggtgcagcaaaccaccatggcacgtgtatacctatgtgacaaaaatgcacactctgcacatgtatcccagaacttaaagtataattaaaaaaaaaatcccccaactgataactgctatagttaacatctaataactactgagcacatatttggtgccagacacagagccaagccctttactgacattatgactttttcatttttacattatcttattaagtagctttgattgctgatgttttagcagtatgaatgctaaggttaagaaggttaagtactcagcctagggtctcagagccgctgggtggcaaaatggagattagatcccatcataccaaatccagggcccctcctatcatatttcttctgcctttcaggtttaagcaaattaagtggaaaactcccattaccctttatcgtagaatcagatggtctctctactgtacctctcagtatgctattgctattattcaaaatgtgttcattccctaaccatttctattttctagagatttcccaggtagctaatcaatttagaaaagtaactgcaacagcctagttttaaatttgattttcattcaaactttattaatttagccattagttttcatttaaaaggaaaggcattttaccaacatgcatatcatatataatcattacaactaatttcccaaattataatcaacgttcattgcaattactggtattttacataaatattataaaagcaatgttatgcatggttccatatcattaacaccatactaaatttacatataaaattggatataatgtgccctaggaaattggtggtatatttctgacacataagtaatttcaagtaatggagtcactaatagtttttgccttactcatcctctggaagccagctataaaagtttatattaggtgaactatattaggtaaaacctttggcttctatattatagataaattaagactgtgctggaattaaacttgtttctaaagtgaagcaaacacaaacacaacattatcatgaaatgaccaaagttactatcatggagtgacctaagctgccattagcaaaagaaacattgtggagactggtacccaggatagtcttcccccaaccatctcctctccctccactaactgcttctacacccaggataaacctgcctgccccatcttgacttagttcattccctcaccttagttcattccttctccactctcagcttttatttttctcttctcagtgctatttctcacttaagttatgggagatgaccttttgggattcctggcccagaatcttcgcagttgtggtacccagtctgcatgagcatggagtatgtgtgaggaggctcttgcctgccctgttcatcctgcccctgtggtgactggctggatgacattgcagaaagctgcaccctatttttttcatcttgactccacaaagccatttcacccagatagctgcctacgcccatatgaacttttcttttaaacatgacagttctgttggaatacaattctaccaattttgttttaatttcttttgaatttgtttcatgcttcacctccaatacctttactggagttcaggcttttatcagaccctgtctgcactcttgcaatacttagctgctaattacactccatgtttccaggaatatagctctgataaattcacatccctgccaaaaattctacaaaggctcctcatctcctacaagatagtccaatctcctgcctaagacatgtcaacttctggcctctatctccttccccaaccttcgctcttggctctccaattgtgtattctatcttcttgatgatttacacgtttcccttggttcccaggcctgatatactctgtccagcctctgccccactctccattgcttcccatcccattccaagcctttgttctcttaaggagctcctgactgtcctttagacagtccatcagttgcactgagcaggcttccctgctacagccccttttgtgccagtaccatttccttgctggcctcattcatcatctgcttccctttatcagagctctcatcaaaatttctgctcatatttaagatgcatccttcctcacttccaaaaataaatgcaccttccaaattttatatatatatatatatatatatatatatatatatatatatatattccataagtaaatataaatgtatatatggaaaagagaaactggaatcacaaagcaaaatatgtataatgctacttctgagaccaagcacaacccaatcagaatgtaacaaataaatgaggtatacatttctcacatattttccctaacaaaaataaaagccttcacagctgatcagagttcatgttgggtttattctcctaatgtttaaatcaatatactacaatttatgatctgctatttaccatttgaatcatatgaattacgtgtgtgtgtgtatgtgtgtgtgtgtatatatatatatatatatatatgaaatacatatataagctatgtaaatatctaggacattttattttactaggtgtttatacacagtagttcatgaaggaaattaaatactttctagctgggcgtggtggcacgggcctgtaatcccagctactcaggaggctgagacaggagaatcacttgaacctgggaggcagaggttgcagtgagctgagattgtgccactgcactccagcctttatgacagagcgagactctttcaaaaaaaaaaaaaaaaatacgttctctacagatcacttaaagtttgtaatttaaaaagagatttcctcgtagaattgtcaggctggtgaatgtagtctttttctacatttaatttcttgcctgtgtgccccacttactgagacttccataacaggacttttgactttatcatctttgtatttccaaggtctaccacagcaactggcccataaggaggtgtcagtaactgttagttaactcatttgccttccaggacttttcacatgtaattgaagaagtggactctccttgtatgagccgatataaagcattagaaaataaactgaatgtggcttgcaatttgtacatcttttgaaagataatttttggcaattacatgagagaaagggagtgtccttgggctttctttcccctgagcaaaaataatcatcaccaaactcacattttccccctaaaaagactaaactctaaatagtcaaatgatatgaaaataatccagagcttacctcgaaactcacagctccattgtggtctgtatcaaatgcattgaacagaaaatgtgcatatgttgtagagtctgaaatggtaaaaagggagtatcattaagtcagtgtttccatatcctacataagacttggatagcagtccaagcttcctttgatccagaagaattaactctgcctcctttagtttgtgctttcttcacaactgcttaccctctttctgtagaggactagagtttgagattcacaggaagaagcaacctacatagaggccattggtgacaaacattctctatgagtttctggctggcaatgctgtagtcttgggtgatgagattaacactgggacaagaaatggtcccataggtggatgtgaagattgagacttgtctggaatttgcttagtgtttggaagagaccatctctagaagtaaagtactaaaaatactaccaatgagacagagatgagttgctattattagtgtctctgtcattattagaactttcatcattgttacaactcagaaaatgatattgggaattagagaaggtgaaaaacatacccaaagtcacacagtgaagaaggagtaaatctgggacatgaacttaggtctttctgactctgagaaccaggctagccctcagccagtaccaggctagcccacaggcagtaaagttggctgatggattggggtcattggtgacttgggaagtttctgtggctgtgttggaaggggactgggtggtcctacatgttcctagttgtatgaagttgcatgaagtagggagcccctactctgtctgggtcctgggtgggattcaaggatctgggtaatgatggacaggtatgtcttctgaagtctaacaggtgttcttagtttgcttctattgggtattcttcccctctcatttttccttccttcctttcctgtttctccgttgtctccttaatctctgggctttctgccatttcatttaaaagtctgtattttttccttattgttttctgttctgagtgcctagctttcattccttagggtttctttgcttgacccttgataaaatttacattattattttcagtgttgcatctcatgggctttagccttttatcttaaccttttttgtcttttcaaaataaaatggtaaccttttagctcattggctctagccttttatcttctgttttaaatctcatctatttctattttataacttttaacctttattgggttttaacttatcattgatttaatttttactttatgaattgctttttataggctgtcaagaagctaagtcatagtaacaggagtacagaattgccctctgaggaggccatctaaatttctctcctggctctcagggctcacggcctccttacaggttgtttttcccgaatgcttcagtgtagtaattaacactactgaaggctatacatttcatgaggtagactgtacactcaatttctcaaaatgacagtggcatcttcgctcatctctcacctttttaatatgctatgaagaactacttatctttgaacacaggaattaccagcaccgttttcagtgaactaaccaagaaccaaaattgggtctaaataacatgtaacactgtgacatctagagtggatatccatccagtattgatacattgcaggaagaaattcttttgcatatggagccaggagtttaattaccataaacttagttctgttgttgggaagctccattatagagttatcaagaattggcagcctatttcaacttgcaaagttgttttactctcagcagtactttttcatgtacttcttgaactatatagtgccctctggagatgtgaattgatcgatggtgtgttgaactgattttcagaggaggaaaaaaaaaagagattttgcatattttataatgagcttcattaagcaagtctctagttaccctgttttcacaatcagagtaaatgcctttaccttagcaagcagtactcaccataaataatggctcaaaacaacgatgtttgctatttttttaatcaaaaagaaaaaagataacatgggtatatgataattactattcttctcaaatggagtttttctagcttaaagcttgatatgtgggaattatgctttcaaggtttacactaatgtggtacagaggacatcctgttcttctaaatgtgcctctgcagttcttttagaagttacagcggcttcccagtctagacaatctatgcacagaggttttgataatagcatagtggagtcagactgcctgaatttcaatctcagcttcaccagagattaactgcatgacctcaagcaagttgttttacctttgtgtggctcagtttcctcatctacaaaatgataacaatatcagtatgtacttcatagagttttttttttttttttttttgagacaaagtactgctcttgtcccccaggctggagtgcaatggcacgatctcgggtcactgcagcctccacctcctgggttcaagcgattctcctgcctcagcctcctgagtagctgggattacaggcacctgccaccatgcccggcgaatttttgtatgtttagtagagacagggtttcatcacgttggccagactggtctcgaactcctgacagcaggtgatcagcctgcctcagcctcccaaagtgctgggattacaggtgtgagccaccatgcccagccttcatagagatcttactaagtttaaatgagacactatttgcaaagtgtttagaaataatcctatatacttattaaaatttcagtaaatattagctattattatttcctaggcaagccacttttatttcaactaccttaaacacatgtgatcaaatcttttacaaacgtaacatcttttcaccttaaataacttgctgtttttgtaggatttctgttgtgtgtctaggtgacgagttctaatttaatgcaattttctgctcaataaaagacaagataattatgtcctaaaaatcaatggtccttctgatggagtttggatttcttctggcaagcacttgaagacagtggaaagttttaaagaagaggagtgaagccactggctttgactgggtgagagaaagaagcaaaggcaaaggaatgtccagctaggcagaaaactggataaaatgacgaaaagagaaactgtctacaaaagcatctatggttctggttttactcaactgtgttcttaagcactcaataaatatttgttaaaagagtgattaactgacttcttggaatctagatttcagtacagtccagggcttaaaagatataacaatgatctcccttctccgtctatgacctcttcgtgatcacattcctttacataacaaaaatagttactgagtttgttaagctgggattgcctcagtttcttataattttacttgtgaagctgaaaaataaatgttgagattttatagttgagcaacaaaatttacagattcttagggtgggaagacattttggatactatttagcattgtatttacattgaacaaaggtaaaaatagggacttgtagtgacatactgaggtcacctagttagttcatggtaaagttggcaatggaatcaagatattcctataccatctcttagaaatcgaggatactagagtagaaaaaacccctaggattcctttggtgtgactcctgcattttatagaggaacaacttgaggctaagaaaagtaaactactcgaggttacataccttggtggtggcagtctatccacaaactctgaacttagtccaaagttcttaacccaattatatcgagaacacagtgaatatagcaagtaaccctagagttcgttcttcatagtatttgaacaaacacacttgattatcatgccccaggtttgtagaatgaaatcaatctggtttatttctttttcctttcccacacccctactcccattgaattcaagcacgaggaatagaatcaccttcatgtatttgaatatacaattcatgacatcgttactatggtaagacaagttcatatgtgtgaatagtagcttctgtcaataagccctctgtaaatcaccctgaaaattgttagaaatactgtcctaggacaagaaggatactcagtgggtgaagtcttttttaaattttattttaatctttatgtctacagaactcatctgactcaagtgacttgcatacagcggctgcttaaaaaatgtttattgacagattattctgacttgagctcatttgttcattcattcattcattcattcattcattcaacaactgtttattatatgcctagtgtagacaacataagtgcattcctacaacatgagcaggaatagcccaggaaactatgatttttatgggctttaaaaatgtttagtgaactaaaagcttacacactaaagcttctgttgtatgtggagtttaagaagtttttgtgtaaccatataggcaatagcaccaacaaaccgtttcctctctgcttgccttacagtaggcatactttatcccctgccaacaagaggcttttgttcaatccagttttttctgacatccagctcaccaaacaagttgggtttgataaactgtttcacaaagcaatagagaaagctaacagcctgacacaatacaaattgcagagagttctgtagataagacaaagcactttcctggaggaaatggtgagatgttgtgatttatggacccatcaatgttactgttcataatgagaaaaactgttgcattcagaccatcatcctgaataaaggatgactccgtggaagtgtaaggatggccatcacatgaattcgcctgccatcagagatcacattcttccttaggacatttttccttttctggccttatgtaagaaacaatttgtatgtatgatattaatttttaaaaatgcaaagcaaatcataattctttaaaatatttcatttccttcagcgatgcctcatgtggtcagatttctgcattcaattaacatgaataatgaaataattgttaagagtgtaacagtaattttttctcaaatccctaatccctttggattttgtgataggaatcctttgcaaaatagatgtgctctgtttaagaagatgttctctaatgcagaaatgttatttttcaaataaagatataattttaatgtggagctctatccaagttttagtatgtaataacttgatttgaaatgattgaaaaataacttaaagattttcatctgcattggtgctttgatattaatgcctattaagatgttggtaggcactcagatagtaaatataatttttctttaaaaaatccatgggttttaaacaatttagaaaaacatgaggtagttaattaattccccaaattaatctctcattaatgcagacagtgaactcattataatcctggcatcaggtactattaccaatacctgtctgtggtttgttagaagggccctcccctctgcactgtagtaatgagatggggtgggagagttgtcatccaaagtatatccaaattcacttaataacagtcttcctgtgttttcttagaattctaatttaattcttttaaaagtccaccgaaaacaaaaatttgttttgacatgttaggcacaaaattgttttaaatccactaaactagctaaaaccaaatggattaaaaccccaaaggaaatctgacttttgtatgaaacaactaatacttaagtgctgtacacttttcaaagagccttttacagatattattccactgtacagtgatagccagccaccatgtgaggtgggtgtcattcattcattcatgcaaaaagcatttatcaagtgctattacttgtcagccactgtcccatgacctgtggatacaacagtaaacaaagtggagaaatcctctgttcccctggagctgacattctagtggagagaaagaaacaacaatggtacaagtgaaatatatattattggattgtctcgagtgccgaaaagagacataaagcaggggaaggggatggggaatgtttaaggtgttgcaatttaagatagagtggtcagggcaagtctcactgagaaggtggcattggcgtaaatgcaaaggtgatgagatattgagatagatatttgggagaagataatttcaggcagagggaacagcaggttcaaaggcccaggagcagcatcatggctggtgtgctggtgggatggcaagggggccactgtggctgggtggggtaagttgggtgggagaatggtagaggataaggcagagaagggacaagagacagtagccaccatttgtaggccactctgtaggttgtggcttatgttctatggaatggtatggtttcgaacaggcagtaacatgatttgcttgcattttaacgggatcactctgactcattttaagagtagaccatggttaggggaggggtcatcagaatcagagaagtcagtttggagactactgtgtttattttggcaggagataacggtggctcctttaagtggaaagtagtaaaaaaaaaaaaagtgttggcaaggtcaatggcaaagtcaactctggccataataacagagagaaacagttgtcccctatattgagtagatgtcaaagttgaaaggaagtactagatggttccctcttgtcttgagataaaaccttcttcctgaactcccgattcatggactccactatcccatcgcatcactatctttttcctccaattctgaatcctatttatctcttttcttttctatcctaaagctattaacatctccttctttaccagtcttccctgtgtataaacaatgtccagtcttttctacattaaaagataaagtcttccactggtatctacccagcactatgatcagtttcctcatcacttcactcttccagcaaagctttttgtaagtgctgtctctattggttgtcgctgttttcttctcatcgtccttttcaccctctgcaatttggcttctgcttgtgcgctccactccctagtagttcatccagggcacttgggctgtcctgatcatgcccaacaatgactcccatgttgccacatcccaaagagaccttctgatccttaccttactggacttcatcatttcatttctgaactatctatctctcttgtgtttatttccataaactgttcattctctgtctcctttgttgatcccttttccttatggttcttgacatgtgttctggagtttcatgctggcctcatggagcttgcaaccttttataattcccccagtaacctcatctacatcatggatttaaccactacttcttgattaataattctcaaatctctatctctttctctgacttgtcctctgagcctcacatttgtgccaacttcttgttgagtctaaatccccacaggcacctcagatgtaatttgtccaaaactgagatcattatcgccctattcctcctgtaaagagtcacctggtgtccatgatggaatcctggaaggtatcacaaactcctctcttcatctctttatgccacaaaaagttagttcatcactaaattcttccatttttgtcatctaaatatgtctgtaatctgtccccacttctcattttctcctatgcatatacttatttaaagaccttattgttttgcctcctacagcagtaatcttctaattagtctccctgcctgcagtattgctgacctcaagttaatcttccactgacctatcagtgaaatgtatcccaaacacaaatcaaatctgactgtaaaagatcccacttaaacttatcagtggctttgcatcacctcaaggataaagtcccatttcttcatatggcatccttgactctctaggacatttcaccctccattgtacactctctaccctagccacacccaaatcctggcaatttcctgcaaatgcccatcttcagttctatgctctgaccctttgtttacaccccatttgcctaaaatgtcatgtccctactgccttttaaagcgggaagacatcatactcagaagtgaacttctcctgagaggtataatgggagagcgaaagactatacactttggaaatggatcaaactctctgcaccttagtttccacgtgtgtatctttaaaaaaatgaggattataggtagggttgttggatggtgaggcatgccagggacaggcacatattagatgctttctgaatggcaacaacttcagctcaggttcaactcatctggagagtctctttttatgtcctctctgtcctgcagctaatttaatcatgccagcactgtgctctcagaatattattttttaactcccataatcacagttatacttgagtttgacattgtccatctgctacactaggtataacattcttttgggcagagattacatcctattcctcttaattccccctacgtgatcagcacctcatgcatggctaggcacaccataggctgtgggacaaatataagttgggcatctgttaggtaattgaaagaaaaactataaggtccaatggcaagaatatcttttcactcatctctaacatgcatgtattatcattacgctatccttgtgttttctttccaattaaaataatatctaggatggttttaattttctcagatgagggagcacagtaaagaattactgaaagaaagaggaacagcagaaaatatacaaggggaggctgcagaaaatctaggttataacccagatctgccactgagtcaatatgtggccctgagcaaaccatttaccttctccaatccccagatttcatatctataaattgaggataattacatttttcctaattttcagagttgggagaatcaagtgagacctacaatgcatgtgaatgagctttgtggcatttttgagcaccctcataatagtcagaaaacattgtgcatttgagagccacagtactgggcacacagtaatagttgtattaaactaaagagcagcctcttggatatttgataatttctaagtcgctggcttttatggtacattaaaaattatatacacttgcatgctgtgcattaattcttttacataacgattaaaaatgtagcatcatgctatgaaaaattaaactcaacactgcaagcataattgtaactctgatagtatgttaacaagtccacatttgtacttacctccctgtggaaagaactgcgagtaaatctctttgaaggtttcttcattaacaacaccactggggcattcctagggaaagtggcagagaagcaatatgagcaaagtgttcataaaactgaattttttttgcacattttgaaacagaactgtctaccatgcaaagctgcaccaagaaaattaaccattcatccattattacaaagggaataaaagcacactataaacttatgtttgttccagttctcacaagaaaaaaaaacgtagatgtaaatatctttgcatattgagtatcaaagtaggtgtaatgtattcagaaacacagtgctgcttttaagaacacatatgtttattataaagtaaaaggaaattgcattatttttcacacagcaagcatgttgcaagatgtttataatatagtctttggtgaatcttggttttgtcctttcaaggttttctgaactcacataatcttcgattcaatggcagaattactctattggcatctctagtggctcaagaagcttcaaccagtaatagatactaatgcttgttaacaggatgtctaggcatacccaagacatggttttgtaacaagtgaccttgggtgagatagaaccccatatttttgaacttccggaaaggagagtctgcaaagaaatggcctggcctgggcttaatagatccccacctttgtccctgggtcaacttgtcaaagaatgatggacattgatcttgggaactacacccatgttggacaactgacctggaggggccacagggcaaggttagccctctgagagtggttttggcatttttgctaataaaaaaaagaaaaaaagaaactttaaagtgtcagaagggggctgccttggtgcagaatataaggtttgagcaagcaaattgtcccccaatctctggaaattcctccattttttggagttataagaaccagtgtggttaagaatttaggcgtagaggccccttgagtggtggagactgacaatcacatgatagcccagaattgaatcatgtgagatattaactgtatggtgatcccttgttatccttggggcattgcttccaggaccaccgcggataccaaaatccatgcacattcaagtcccacacttggcactgcagaacctgcagataagagaagttggtccttcctatcctgtatctttgatctgcatttggcagtggatgctgaagctgcaaattcagaggggcgactatatttattgacaaaaatccacatataagtggacccacacacttccaactagtgttgttcaagagtcaactgcacattgtaagtggagaagtggtaagttctgtttagtctcttttagtagattctcatgaacagtcccatgtgatcagagctcccctgactctagttgtcacagcactcccacgccacctaacgtccacccaggactaagttcactggggaaggatgaatggtgtgctaactccccaacagacctgactttagacatgaatattctgtgtactctaaatttgatactgtttccagcatctttatcaatcacctatggtagtatttaaaacatcacttaacccttaaaatcattgttccctcactaataaacttactttctttattccagtgagtcagttactcaactgtaatgtgcttcacctgcagaattttctattttctcatttgttgttttgaaaggtaggacctttgatacataaacagtgttaacagtttcaatgtgaatttgtgtttacagagcttctcgatatggttttatcccatttgttaatgatgagcttaggtaggcaaaatagctgcattcacagaggcagaactggaggtgctgagtggcaaagcactttgttacacactaagccagtggggaagctggaatgtgggcttggaactctccaggtcatgacaaggtttcgtattagatgacccctgtggaaataatgatgacctcaaggacctaagagaattggagtaaagaaaaaaacaaccaaaaacaaatgagcaagcaagcaagcaagtgaactgtgatggttgattttatgtgtttaacttctctgggccatagtgtccaagtgtttggtcaagcattattctggatagttctgtaagggtgtttttgagatttattacattgatgcaaaattgcggcttttgctattactttcaatacatttaagctggtagactttaagtaaagcagattgccctccacaatgtgagggggcctcattgaatcagtttaaggcctgaacagaacaaagacggaccttcccagagaaagagtgttcttcagacatcatctgtaatattggcttcccttgttcaccagcaccctgcctttggacttgaactgtaactgttttctgaggctccagcttgccagaccccttcattagatatcaagctggccaaggctccacaaagtgtgaaccaatatcttaataagtctctttatactcacacatcctattagttccatttctctgaaggaccctaatacataaatgaattaacaaccaatagctacaactccaaaggtggtatgtatacagctaatctctcaaacattttgactatctatctagctgacaccaatggacccattttaagactaaacactttgcagttagaccctctcacacatggaaattgtgatttattggctatttaatgctaagccagttgcttgggatagtaaggagagagtaaatacctggctctctgccatcaggtggcaagcttgtgcaaagttagagctggaaagttgcctgggagttaaaagttgatgctgataaaggaagaggacttcaagcaaagggacctctgcatcaacaaatttgttagctgccttcagtctctagatatatttgatagatataatgtgaaatgaatttgtaaactgactatctgatatgcatgtgttttatgtttaatcacatatctgtgtcagaggaaaccttttctctgccaaatgaaaactactggccaagtttcagggtggaaagtctcaccagataaatttgtttttatccaccttatattcattacattagtttacatctctacaaacacatactgtatgcctattattccaggagtcttctaggaactgggactgctacaataaaccagtcaaaggtcttcccatcatggaacctctatccaactagaagaataaagactgtctttgttcaggctcctttaacaaaatgccatagactaggcagcttataaacaatagaaatttatttctcatagtactggaggctaggaagtctaagaccataggattagcagattcagtgcttgatgaggccacattcctggttcatagatggcatcttctagctgtgttcccacatagtggaaggggcgagctagctctgtggggtcttttataaaaggacacttatctaattcatgaagtctctgtccacctgatctaatcatctcccaaaggccccacctcctaatactatcacattgggggttaggatttcaacatatgagttctaaagggacacaaacattcagaccatagcaaagaccaataactaaatattaaaaaatcaaatccaagaatgatgatcttttatttattcccagagattttttattgaaactagtgcatttttttaaaccttcaggtgagaaaaagatgctagtgatttacaagatggtatacattctgtaactttttcttcacctcttctgtgcagtgatctctccataaaagtggtctctctacttctctatcaagaatgaatttggccaggctgcatgtgcagcaaagtgtaaaacataaacaatgtgctgtattagttaactcttgctgctgtaaaattaggccttcaaatgtcccttaatcaaaatgcttgggaacagaagtgtcttggattttagattttttgggatttggaatattcacattacactcagcagttgtgttagttcatttccacactgctataaagaactgcccaagtctgggtaatttataaaggaaagaggttaattgactcacaggtcagcatccctgggaaggcctcaggaaacttacaatcatggtggaaggcaaaggagaaggaaggcaccttcttcacaaggcagcaagaaaggagaagtgctgagtgaaaggcaggagccccttataaaaccatcataactcatgagaactcacccacttatcacgagaacagcatgggggaactgcctccatgattcaattactccacctgctctctcccttgacacctggggattatggggattacaattcaagatgagatttgggtagggcacaaagcataaccacatcaccagttgaacatacctaacctgaaaatctgaaatactccaatgagcatttactttgaatgccattttgtctctcaaaaagttttggattttacagtattttgcttttttggatgagggatagtcaacctgtataacacagttaaaaaccacgtagtatatttcttattcacataacaatcttgggtgagtgtacagatcagctgatggttcttctagggacagaggctaatgaagatttggtgactttaacatatggcgccaacagtctctgtgactgtgtcatccagaaggaggaaaagaacgctgaaaagagtacatggaaactttttatgggccaggtcttaaagtggtatacatcatttctattctcattttttttgttgttagagatcacttaatgtgtctaccccaaacaaaataagaagtctggtatggccagaaagaagacaagaatgcagatttgtaaagagtttggaatatctatccctgtggcatgtttgaaagatactccaagtgtctgtgttctgaaacagttctcccactgatgctttatttattgatttttattttgtatttttgtaaagatgggatctcactatgttgcccaggctggatttgaattccctgccacaagcaatcctgccttggcctgccaaagtgctgggattacaggtgtgagcccagcctcccactgatgttgtaacatgaagattatcaagtcatttagcagtataaattgtctccatttcccaggtgtcatttttaaagactgtttacttgcttcaagtaaacaagtacaatgaagcttaaatgtttgagcatgaattttttcattagatttttctaaggatccaagaagcagtagggttcctgggtttagggatagtaagaaatgcctcactcatccatcttctgagaatttgctgcaagcttctactaacccttatggttctgtattctattttctaatgaaattttgtctgattattagcaaatgattattccatgaaaatatgccctctatagaaaaaaattaaagaaaatgaaaatcacccataatctgactactgtaagagtatattggtcatttatataagcatatataccgtagaaataaagttttaataagacaaaattatagcattttatgttctttaactttaggaaatatcctgaacattttttacatcatgatttttagtgactgcataataatgcatccattgaacttaccatactgttgcatattgaggcgattttggcatttttgcactacataggaataatgatgtaattaatattctatgcatccttctgtgactgcacttgtggtttcttctttatgactaatcccagaaggagaatcgtaagaccaaccagtttaaaccattgaaagctctttctatgcacagtcatggtgctttccagaaacgctgcatccattcgtgctgccaccgcagctttatgagaaagtctcacaccgagaggagctaccgactagaatcacatgggaattggacacacacacacacacacacacacacaaccccatgaacaaacagcaataatttgcttccctcatgaatccaatcgtcattctgaaaattaccagtggacattgaggcgtttggacaggtccctccgaggcataaagcaatttgcctgtttttcacacagacagggtcgctgtgatggcactcagccggaccacatcaccacaatcacagcggtttattgaggataaaataaacaactccattccttcttatgcagaccattacttttaacactttcatcaaccctgaaaggtgggtattatttagacatgaggacaatgagcttggagagatgaagtcacttgtttgagtcacacaggttttgacagagacatctttttgctcatttattcaataagtagttatttaatgccttctaagtgtcagcaaatagttcatatgccttttactattctgggcactggagatacaggaatgagtttttaaaattccatttcttttttgctcttgtggaatataacatttagtggaatcagactcataactctgactccatgaattgcaatgctatcttgccttctggattattactttttcttctattaggactgaaaacatagtctcctggagagtcatctgtggaaatccttcttctgggaagatgtacacggtgtatttgtacccagaggcacccatcacagctgcgttggagagaggcatgtgcaaagggaagccatttcaatcaaaattgggatcaccgattaaaatttattgtgcattgtagcttgagagatttgaggaaagcaatctttttctttttagaaatctttggttttagtgtaacaagaacctccccaccttcctgtgtgccacatactctttactgtcattgtaaatggctagatagtaatgggctgaggaaaatgttctggtttttaggaccagtcaaatgaactgctccatccagtatttaggagctggaggtctctggttctgctggctggtatacttatctatgatgaccattgcatttctttcattgcctgtgaaacccttcactgtgatatgatcacaacacaataaaagtagaatgaggttttctttgcaatataactgccatagatttgtctgttggtgaagaaacagtcgccttttggggccttactgctgtgttccctgatgagccttttcagtcctctcaggccatgtggggacacatgtgagggtcaagattagttgtagatatgcaatgaatactatgctagtactaatatcaattttaataaggcagtattactattgtaataatcagcataaagtaatactttattggtattgatattttataattattaatgtgatgatgacaatgatgatactgatgatattaagctaatacacatgagcactttttatgttccaacccttgcattaaatgttttacatggattatctcgtgggaatagaaagatgttagtattaactccattttacaaatgaatgaactgtcttagagaggggccactgcattcccaaattagaaaatagcagatctaatctatagatcacagaatcaggaaacttgagagtttaaagcaactttagaggccaggcacggtgggtcatgcctgtaatcccagtactttgggaggccaaggtgggtggatcacctgaaatcagttcgagaccagcttggacaacatggtgaaaccctgtctgtactaaaaatacaaaaattagccaggcgtggtggcacatgcctataatctgaactacccagcaggctgaggcaggagactcacttgaatctgggagatggaggttgcagtgagccgagatcacgccactatactccagcctgggtgacagagcaaaactccatctcaaacaaacaaacaaacaaacaaacataaagcaactttagagacaattcaattcaatgtcctcattttgaaggtgaggggatagagattaaggaggttataggaactgaccatagatacacagggggctgctaagcctgacctcatgtctaggtttcctgaggtctaggactaagctttgatactgcaaatgtcttcgtgtccatacaatagctggtaatttttgtcaggtactatttagaggaatctagtgcagtgcttatattcttgggctctggagttaaatagaaggcctgggttgaacccctactctgccacttgggagctgtgtagcttcaggcaaactgtttaatctaagtctcattgctctcctctgtgaaacggggacaggaattgacctcagagagctgctataagaatgaataagatacacatattatgctattatcctagccctctaccttacacatcatatttggtcatttaatattagctgttagtaccatggtaatagtttaggatttggtaagcagaactccatcacgcaatgagtcactgtaacatcaatgccgatagaccaaggataaatcatatttatcaacgtggttgaatctagaataacacaggtctgaaatgcaatcagcttatgaagtatatatgaattacgctttctattctagtgttataagttgaatcactctatctaatatcatcagaatttaccctaaaagaaaggaatattgtaattgtaaatgatagcagaggagaataaaggccaccatcatggaaataaatgtcagtagaaacccaggagcctcttatttattaatttaaagttttccccagcgatgcttacatggtatgtttgaaatcatcatggaaagtgttgggaagggtgctttggagaaagatccatgtatgcataggaaattgctaagaaacatattttgtgagtgcttcaagagttcttatactttcaccttataaggaaacctttcagcatttcctggaaggttttcagagctctgttgaaatgcatgagaaatagctgcagtggtatgcaaatcacaggtataataacatcatataattataatattgtccactccaataatctttgcccactctattagctgaaatcttctcttcccctaaatcattctgttctgatatgtgtcttctcctcaggatcagaattgttattaaacatttagagacttcttcaggattaaaaaaaagaattacagtaagacatttcataggaaaaaaaaactaaaagtgcttgtgaaatagttatttggggatcctttcatgatacctgtaatgccacatctcttaggcatctgtatatttcaccaactctcacacccatctctggtgctaaggagaacatacaaggtagtctgctcggtctatcagttaaaatagtatttagcatgtagtatgacaattcagagattctctggcattctataattgcaggagaattttcaaaatttaaatgacacaatcctacaacctgtgctgctgatatcaccagattctgtggacttctctgctctctttagagttagtaaatacaaggcagggactaacctttacgatgtttagaatagggaatactaaaaatatttatgctgaatgaataaatcttcagtcagttcttagcttttaataaattagaaaatgaatttgctctgataatgtccttcaaaacttgggcctacatttttagaactcctaagaccaagaccaagatagtcatgggggttccgatatccccatgattgcccacaatgactatgatcgcagaaattaaggggagatggctaggatcaagaaaaacacttcttatttcaacataaaaagcttaacatagtcaaaaattggattctaaaaagctcatttaaaaattataggattaacctttcagttttcaaagcagaaaagctgatcattaagaactagagctggctataaatttctgttctaatatgcccaggtgtttgaactcctagcaactcatttattccttcttagtctaaatgttctcatctgatataacaggtaagtaatactaacatcacaggtaagcaaaagaaatgcaaactaaaatagacaatggatgaaagaaacccaaccaattttaaaaactgaatatactcaacatgttggatattttcttgtttccaaaatctgcattaactgcctcttccatttcctgaacacacttctggggtcaaagtggttaaataggcactgcagattaaaaaaagaaacagccaatggtgggaaaaggctgacctagatactatccttggaaaaggaatgagagctgggtgaccaagattcaattcagctgcaaggatgtgggcacattctgagccccacgagttctcagggtcacccaggatgaagcagaaatccaaggtactaggcaaaggttctctccccttcagttctgccctctaaccatatggaagaaggaaatcacatgagatttacagccaaaaaaaaaaaaaaaaactggctcaagtttcagctctactactaatgaagaaataattgaaaagttctgctttgagtcttagtctttaaaaatgcaggaaacaatagcatcttatagtaaagaaatgagaactaattggcattatgtatataaagattctagcataatactaaacattctacaaattgtacttatttttactattatctcttcaagtaacttaagttggttctgcaaaaagagattttccaaattttgtaggaaaaggcttcctgggattgggcccaattcctgaatctttagtggaatgcatgtagaattgtttgatttacggagacttttaaaaggattttcccaactttatccagaagacagtgtccattttgtcagggtcttttaaaaattatgatgtagtgaaattctataggcacccaaaaccatttagtggaaaaaaaagacaatggtgccctgggacaaagcctatgtatcagttttctattgctgcataaaaaatgaccataaacttagtaactctaaacaacacaaatgtatcatctcacacttctgtgggataaaagagtctgacatggcttagctgtgtgctctgctcagtctcccacttaaactggctatggttctcatctgggccttgcagtcctcttccaagctcactgaggttgttggtagaattcagcttctgtggttgtagggcccaggtccctgtaaccttttggctgtttactgggggcttctctctcagcttcattccatcttcaaaccagcaaagcaaaggcctgttgagtccttctcacactctgattctctctgacttcccctttggtaaaggactcgtgtgattagatcaagcccacaaagatcatctctgtatcttaaggtcaactgccctgagactttaattatatctgcaaaatctcatcacagtagtaccttgcttagtatttgattggataaccaagagacagggatcttgagtggctgcatttagatatctattaatacctcccacagcctgcttcttctgaacatcagttcattttggttttcatagcagtttttgtttaacaacagtcttttttttacaattatactcacaagtgtatccaccacaactcgcaactatatttcttggcacctgccatagtttaatgcgatttgaaaagactatattctgtcaaggctttagaatcagcagtgtaaagaccagctgtgaggccaaaattcaatattttttatgagtgctaagaatagtatcccatatgctgagtgttccccgtctagagtatgtctgcctatatccagagcagaaataaatttttttagattttactaattgattagatcactttcaagttggcatgatatcagcctaataatattgaccaaaaaaaaaaataccgagtaaagaattctacttaaaagaaacacgcagtgtttcaatcagaaagaataaaataaaatacagcaggtactccatatcgcagctgcagcatgcacagattcaactaactgtggcttgagaatacttgaaaaaataaaaattaaaaataaataaaaaataaggcaggtgcagtggctcgcgcctgtaatcccagaactttgggaggctgaagtgggcggatcacctgaggtcaggagttggagaccatcctggccaacatggtgaaaccccgtctgtactaaaaatacaaaaaattagccctgcatggtggtgcatgcctgtagtcctggctactccggaggctgagacagaagaattgcttgagcccgggaggcagaggttgcagtgagccgagatcatgccattgcactccagcctgggagacagagcgagactccatctcaataaataaataaataaacaaacaatatgaatgaaaaacaatataacaactatttacacagcatttccatgtattagttattataagtaatctagagatgatttaaagtacatgggaggatgtataggttatatgtaaatactacaccatttcatataacgagacttaagtatccccagattttggtatccatgggggagggttctgaacccagtccctcaagaatacagagagatgactgcatggagatgatggtatacacatatgttcatatatatatacatggttgtataaagcctttttattccctgaagatttaaaaaaatctattctctcccagtctgatttctgtcacctactaaattggctagattctggccccttgataacttcatttagactatgatttctggactccttatgtgagattacacattttcctcatgtgtaagccattttttattgatcttttttgttacttatagtcaaaagcattctaacataagctacaaccttcttgtccttgtattacacctttctacagaaagagaaaataaaaatgagttgagtttacaggttgctgacaagtttggtgaaatgtctgctggagaaagaggtgtcgtctatagattacggtggtgggtgcgcatatgcaggtccagatttttggagaacgtcttttaaagtctatccaaagacactttgagaaagcataggaattgggggtgaataaaactcactttttttttttttgagacagaatctcgctctgccgcccaggctggagtgcagtgctgcgatctcggctcactgcaagctccacctcctgggttcaagtgattctcccgccttggccttcctagtagctgggactacaggcacccgccaccaagctcagctaatttttttgtatttttagtagagacggggtttcaccgtgttagccaggatggtctcgatctcctgacctcgtgatccagccagcttggcctcccaaagtgctgggattacaggtgtgagccactgtgcccagctgaataaaactaaatttaatgatcattcgtggtctgctgggcactgagccatgtggtgtaggagatacatgttctcattaaatccctgagaagtagaaaaggtagatgttttaccacacaatgtttaagaaatgagcacagggaggtttaaagaactttcccaaggtcagtgggactgggatttgaacttgagtttgactgcaaatctttcacatcttcctaagcttgaaaggtgagtgcacctgcggggggaaaagttaactaaggggtaacttttatcccaatgtctttcaatcctattaatcactaaaacacaaagtattcgttatttgttcaacacgtattcatataccaagcacttgactacgcacaggagcgtaacggttaatcaacaagcatggccctcatccaaaggagcttactacggaggaagcagtcagtattcaaatactgacatcaataaatatattgaaaccctcagggcaaagcagcatgaaaacttgaattgttttttacaaataaattgaaatgtcccaggtgaggggttggaggataggacctcaagttgtctggtcatctgctttggtgaggcaggttcaggacaggtcagattcagctctaaatacattttatacattttattatacattttgttccctttctctctctctttctttcttcttttttttttcttccgagtttcgctcttgtctcccaggctggaatacaatggcacaatctcggctcactgcaacctccatctcctaggttcaagcgattcttcagcctcagcctcctgaatagctgggattacaggcgcccgccacgacgcccggctaattttttgtatttttagtggagacgaggtttcaccatgctaatctcgaactcctgacctcaggtgatccgtccacttcagcctctcaaagtgctggcattacaggcgtcagccaccacacccggcccctttccctttcttattgccattctgagaaaatactagtttgtccctcttgcacaagtttttccctcagtgagctaccatttccaggagcagccctgagtctctgaagttaaagaaaaaaaaaaaaagtttagtctgcttaattaagttcttgttgcaaaactttcttagttattactctcagttgtagcttttggaatctaacagcccctcgcttatgagccactcatatcacttactagcctggaactttgaataagttactaaacttcttcaagctggattttatcatcactcatttatgcaggacgtatttttgaaattgttgcaattgttgcaaatacttgagaagtttccaccctcctttgccttctcctagtgcttcttcagaggctatgaagggaacaattatcaagggtcacggtagctgcctaaaaggaacctgtgtctagtacttcagtgcttccgagctctcaggtgggacagtaaagcctctgtctcctctccatgccaggcaaaatgacccaaaaggaaactcccgggcctgttgactctgagcaagctggggcagaacgcttccgagggctctctggagctcagacggcgctcagcgtgagttggaccaaacattcttagggttgtatcatcataatgaggcacaagggggcagtagtgtcctccatgatagctagaaaagcgatttccagttctttttcttaagggattgttcttttcctaagcttggtgcctgtctgggtaaatttctttcaagaaggctatttcctttttatgaacggtgacagcctcattcctacattagataatttaaaaaattaactatttctgggaatggggcccagagactctgatctccattttggatattacatttggtgtacgtcagtctgaattcacaatcacttttttggcagttgggccacctttaatttagtcaccaaaaacttgtagatcttagaaaacaaataagcaagacaacgccactaaagttccaaagcttgagtctgaaaaccttctgaaattgttaagtgtatgtgggctctggagtcaaagctgcttgagcctgctttgctgtttaacaggggaacattttaaacctttaagatgaaaataatgatactaccctatctggaggttattatgaggcttaaataaagataacccatgcacaatgtctagcgtcgtgcctggatgtataaacacccagtacacattccccatggaggaaattatttctacaatgatgctcgttctgaacctgttagcttttgtcatgttttcatgtaatatgggatattatgtttatccttgttaaataccatctgcttatttaatttcagaggattttcagaatatcacaccagtgttccacttccttagttattactctcagttttgtagcttttagaatctaacagccccttccttatgagccactcatatcacttactagcctggaactttgaataagttactaaacttcttcaagctggattttatcataattaattaatgcaggacatgtttttgaaagcatattatatgtcagagagtgtaagaagaaatggagctaaaacaatcaagacagatgaagtccctcctggagtttgatgactatcagagaagtcacacataaaacaaagttctgtgtaaataaccattcagttacagttgcgataagtgctacaaaccaagtatggaaggtctaatttatagggaagacttccctgaggatgtgacatttaaagagggacctgaaggataagtaaaaactagcaggagatattgctggggaagaggcaaaggaaccctgtgtacaaaaacctgtgatgtgatcaatgactaaagagatggcaaatgtgcctggggagtgtggtctgagacaaggttggttaatttggggcctgctagttacattaagaatcaaggtctttgccattcacaagataggtatcatatacctgtttttcagagctctggagagaattaagagatgatttacatcaagtgcccagcacaatcccaatcgcattctaaacactcagcatccctctcttttctgtttactctaccagagttgaatttttacctctggtttattatttattcaatacgtaattatttagcgtctactgtgtatcaggctctctgttataaactgaacaaacaaaaggggaaaagcagacatggtcttgcctttatagaatctctccactgatgagctattatgttctttgtgcatatgaatttatttcaagggaacaatagtttcaacatatatggcgattaaaatcttgtgctcctatctccaaaaattaaaagtaaataaaagcaagcaagcaagcacacagaataaactcacattgccatggattgcaatgtaaataactcaagattatgaacttgtatgtaggagttacttctgcatgtttctttgcttttgctaatgattaataataacgagtccaggccagacacagtggttcatgcctgtaatcccagcactttggaaaaacaaggcaggaggattgcttgaggccaggagtccaaggccatcctgggcaatatagtgagactcagtttcttaaaaaaaaaaaaaaaaaaaaaagttagccaggagtggtggcatacaccttttgtcctagctactcaggaggctgaggtgggaggattgcttgagcccaagagtttgaggctgcagtgagctatgattgctgctgcactctagcctgggcaacagagagagactgtcttcaaaataaataattaaaaagaataatgatgattgtttttacagtatattcttgcacatggtacagatggttagaataaatctctgtactactgaaagtgctaataagtctccattatattatcttaggggctaagtatccttcaggagggcagaaagactcccagctattaggtgtatctaaaccccacatggctatgtttaccctgaaactgaggcagtctaactcttattcctttctgtttacctgttttaatatattgcatatttatctatttaatatatacaaatgttgtcttctgataaaggtccagaaattccaggcatataaaagagcttcaaatcccaacaattctaccacattcacttttcatttccatctgcacatttttcatttttagagctcatggatagtctagacatttatttgcaaatattatgaaggtattatttcaatcagcaagggattctcttcaaaacttatatgagcttatggtaacaattcttattctctctagtgaggcataaagctaaaagttttatgtttttgccccgtaaggaaggaaaaacaatgcatgtttttgtttttttctagtatctcacagatattttcatttcctggtttaccagttgttaaccttaatgcatcccagaaggagattaatatttggatttaaataataggagctctactttcggtttcttgttatctttgctgggagatgagaagtctggggtggtttattctctgtacaacctctcaaaattgtactatagaccaacatactgaggaagataaggagcaatccctccagtacttacaatgctcatatgaaaatagatgattttctgaaagaattagaatgctatattttattaattgtttctagttagactttaattccaacaactaatatctccttctttaagaatgatttccctaattctaccgttaggaaattatttaattctaccataattatgttttatttttttccattttatgccactgtgccaggcactgtccattttatgacatatttgtgtcagcttaacaaatctagctcatcagttcagaatcaacaatgaaccaaatattactgtagattatatgttaatacataggagcacagttattacatgtataactatttctccattttgtgaccattatagggtaattatgaatagatgaaggcatgattactttagatcaaaacacaggcaaaaaaaatggatcttctttggggaaatgttttatgctatagactgaaagtgtgtgtggcctccaaattcatatgttgaaacctaatctccattatgatcatattgggaggcggggtctttgggaggtgtgttagttcattctcaggctgctataaagaactgttcaagaatgggtaatttataaagaaaagaggtttaattgactcatagttccacagggctatagacgcctcagaaaacttagggcagaaagggaagaaaacatgtccttcttcacatggcagcagaaaggagaagtgccaggtgaagggggaaagccccttataaaaccatcagctcttgtgagaactcactcactatcatgagaatagcatgggggcaactgcccccatgattcaattacctcccactggatccttcccagaacacatggggattatgggaactacaattcaagatgagatttgggaagggacagaaagcctaactgtatcaggaggtgattaggtcataagacttaagtttttaatgaataggattaatgttcttataaaagaggcccaaagagctgctgtgcctcctccgccaagccctagtgacataatggaaatatggtcttccatgaaccaggaagagggactttaccagtaaccaaatctgtcagcacctcgatcctggacttcccatcctccagaaatgtaagaaataaatttctgttgtctataagccacccagtttatggtaatttgtgacagtggaggttgtagattacagagaaaaagtggaggttgtagattgcagagatgaattagtgtagtttatgaaaccatgaagtttgacgttcctgagggatatcccagagaagttgggaaaccagtaattagaaaggagtttggaactcaggtcagaggtcaaagcttacagctatcagtttgtgctcctttagcacataggtatagagatctcccaaggaaaatacctaatgaagaaaaccagggagctgaatgcacagccttggtgggaagctacatttaaaaaacaggaatgggataagcagtccatgaagaccaggataaagtagacagagaggtacaaggagaagccgtagattatatcaaaggaaccaaggaagaagaggcattcaagtaactcaaggcctccactcccaaactcagcagagacttcagttaggtccagagaagtcacaggagaaagtgttagtagcatagactctgaaacaggctgtgtaggcttgcatctagtctccactactcacactagctgtgtttcttaaattctttgtgccagtttattaatttacttgtgcctcacttgccttatctgtaaaatgggactaatagtatacttaccccatagagttaatacaaccataacattgaccaatatttgtagaaccttaaattcttaactcatagttagaattaaatatatttattgaatttaaatcaagcaattcatagatgtcaagattggaaactattcagtggatttgcaaatgaaatgtagttttgacacacacacaaatcagtacaaggaaaactggggaaatctgaataagatcagtggattacatcaatgtgagtaacctgatttaatattgtactgcagctttacaagatgatactactgggggaaatggtacctggtgacctccttggactatttcttactattgcatggcaacctattgttatctcaaaataacaagtttaatttaaaaatattggtagccatggaaaataaaggtggtcttgacctatgaaagaacaatttaaatgacatggtagaggcagaagccaagagttaagaaataaatgcagatgaggggttatatagactgaacttagacagctgttttaggaattttatgtaagagtataagaatgagacttgccaatagttagagagagctgtgtgtgcatgtaaaagttgttgttattgctgatttggaatgagtatgtcttctaatgcattttttaagggtgaatgagacttgactagcattacaatatgtaaggaggcagctaggaaaagaggaagagacagggaggaggaggaagggagggaggcagataaattataaagaggaatcaagatatcataggaagtgggattgaaaacactagggaaatggaacattcttttcttttatacaggaagaataagtcagcaaataaataccaaacaggtgccagctatacactggacttccttctaggagttaattaagcactgtggttttgattgaataatacagatcaaattcctctgtcccgtgagaaaatgagacagttctgtaggtacatttactgctggaatcagaagagctgtaaggatgtataggcatgttactgtaaatagatgaggagacactagatcatgaaaaagagacaagattatcaagctgagtgtaaaaattgctaattagtagtgactctcatatctggatttttgtttggttttccccagcaagtaatagagaagtggaagacaaatcattctctgaccctagagttcggtgaccccagagccatataggtatgtgacaggttggaaactggcttctcaaaatatattgataacctaatctctggaacctaccttacaagtcccccctgccccacaaccccccccccccacacaaaaaagaaatgaaaacaaaaaaaatttcaggtataattagtttaaggatctctataaggagagattatcctggattatccaagtgggccttttaggctatcccaattgtccttacaggagagaggcagagagatgtgacatacatacagaggaggaagggatatgatgatggaccagagagacatttgaagatgttgaccttgaaaattacagtggtgcagccacaagccaaggaatggtgacagctgccagaagaggaaggaaaagattctcccccagaatttctcaagggagcatggccctgctaacaccttgattttggctcagtgatattaatttcagactttcgacctctagacagtaagagagtaaatttttgttgttttaagcctttcagtttgtagtatgttgctacagctgcattaggaaactaatacatgcatgattgtaggacatggataaggaagtagggatgttcaagggtatttcaggaaatcaaccatatagtgcagattagtatggaacttgtgagactaagaagggctggtgatcccaaaggtcttgcttgcagaatcaatgagcagaatgtagtgagattgagggcttaagacagttgaatggatataaggttgtggtcaaaagggtgagaccatcatttaggatgtcaggaattaagtagtttcaggtaataataaagtccaagtgatatccatcagagtgaaaagtggaatggaaaagaaaataatggcatttaaagagtcaaaaaacactgaagctcaggtgagtggctggtaggcaggtcaactccatggatattactgtcaagccaatgaacaaagattttaaagtcagcgatcaaagtctggaatgagtatgatacagaaactctcccagtaataacatgagacgccctgattctggttctctgtgactcagctctgttagacaattttcttacttcaggaactgccaataccccatttaacatgatgctggtgaggcttttaatcccatttccatgggccacagggctaggtcaaatgatgcaggcttttccaggaacagttctccatcccccaggccaaaatgattggttcagtgtcatgtgactaaaactagttcctgccttgctggagttattagcacggagaaaaggtgagtaaaagagacagcatcctgatacactgttggagccttgatccagccatgcctgatgctgtaagtattcctatcttagatatgtgagtcaataaacctttaacttaagatactttgaatgggtttttgttacatgtactcaaaaatatcctaatttataccagaatagtattattttcttgctctttgttctttacagggtggctacaaaggaatcaatgtagcctcgtagtttctctggatggtatttcagtgctttgggagataaccaccacataaatgagagagttcctatttttctttgttattgttttactatctaaccccagctacaagaaaggatatattggtttattttacaaactttatcttcacaatcagaaggatgtgagctgtagagcattattttaaagaccagtcggaagatgaaatggtgcaaaaaataaaaaaagaagaaaaccaaattaatctgcaaacacattagaattttcaagatttaatttcactgttatttttgcccatttgaagcaaatctattcactagatctctattaaatccctactgtaagccaggtacaaataaatgagatgaacaatttgaactgatttcaagttgcaaagtaacaattatatgatgaatttctttgagaagcaaatgttggtatatcagtccattttcccgctgctgataaagacatacccaagactgggaagaaaaagaggtttaattggacgtacagttccacatggctggggaggcctcagaatcatggcaggaggcagaaggcacttcttacatggtggcagcaagagaaaatgaggaagatgaaagaatgaaacctgataaaaccatcagatctcatgagacttattcgctaccacaagaacagtatggggaaaaccaccccatgattcaaattatctcccattgggtccctcctacaacatgtgcaaattatgggagtataattcaagatgagatttgggtggggacacagagccaaaccatatcattcaatccctggcccctccaaatctcatgtcctcacatttcaaaaccaatcatgccttcctaacagtcccccaaagttttaattcatttcagaattaatccgaaagtccacagtccaaagtctcatctgaggaaaggcaagtcccttctgcctatgagcctgtaaaatcacaagcaagctagttacttcctagatacaatgggagtacaggtattaggtaaatatagccattccaaatgggagaaattggccaaaacaaaggggtcacagggcccttgcaagtccaaaatccagcagggcagtcaaattttaaagctccaaaatgatgtccttttattccaggtgtcacatccaggtcatgctgatgcaagaggtgggtttccatggtcttgggaagctctgcccctgtggctttgcagggtacagcctctctccaggctgctttcacaggctggcactgagtgtctgcagcctttccaggtacatggtgccagctgtaggtggatctacctacagctggggtctggaggatggtggccctcttctcacagctccactaagtggtgtcccagtagggactctgtgtaggggctccaaccccacatatcccttctgcactgccctagtagatgttctccatgagagccctgcctctgcagcaaacttctgcctggacatccaggcatttccatacatcttctgaaatctagacagaggttcccaaacccaaattcttgtcttctgtgcaggctcaacaccacatggaagctgccagggcttagggcttgcaccctctgaagccttggcccaagctctacattggccctttcagccacagctggagcagctgggatgcagggcaccaagtccctagactacacacagcatggggaccctgggctcttcccaacgaaaccatttttttcctcctatacctctgagtctgtgatgggagaggctgctgcaaaggtctctgacacaccctggagacactttccccattgtcttgggaattaacattcagctcctcattacttatgcaaatatatgcagctgacttgaatttctgctcagaaaatgggattttctttcctacagcattgtcaggctgcaaattttccaaacttttatgctctgcttcccttttaaaatggaatgcttttaacagcacccaagtcacctcttgaatgcattgcttcttagaaatttcttctgccagataccctaaatcatctctctcaagctcaaagttccacaaatctctgcagcagaagcaaaatgccacaagtctctttgttaaaacataacaagagtcacctttgctctagttcccaacaagttcctcatctccttctgagaacacctcagactggaccttattgtccatatcactattagcattttgggcaaagccattcaacaagtctctagggatctccaaacttttccacattttcctgtcatcttctgagccctccaagctgttccaacctctgcctgttacccagttcctacgtcacttccacattttcaggtatcttttcagcaacatcccacttctggtaccaatttactgtattagtcagttttcacactactgataaagacatacctgagactgggaagaaaaagaggtttagttggacttaacagttccacatggctggggaggcctcagaatcatggtgggaggtgaaagtcacttcttacatggcagcagcaagagaaaatgaggaagatgcaaaagtagaaacccctgataaaactgtcagatcttgtgagacttattcactaccatgagaactatatggggaaccacacccattatttaaattagctcccactgggtcgctcccacaacacatggaaattatcggagtacaattcaagatgagatttgggtggagacacagagccatagaatatcagttggtaacacactgaactagggctctaccattaagtaagcacacagaaatacaaagttcaaataaggataaacagggaatataaaaactattctgcttaataggaattcagatacctcttaattttttatattatctagtaattaagagtgagtgatattattgggaaaccataaaggatccatttcatcagcactgttttttgtttggttggttggttgttttgagcccttacatatatctggcactgggtaggctctgagaatacaatggaaaaatggcaggcctggttcctgcccctaccctttggttcctgtcagggtattctctgaggcatcacagggtttatccagttcactatttagtaaatgataaaactcacattcaaacactagtgtcctaaaacaatataagtctgtctctcctaaatgagctcattatttttgttttagccacctgagagtagagtttctaattcctatctagcttgctgttcaaataactgataattaatcccagaacattagtttgcttgaattgaaaaggcacatcacgttcaagtgcctcgtttttaatataaggcaaactgaggcaaagaatgttaaatgttcttcacagaacaagaggagaggccacttttcaccctcagcctagtgtttatctgactaaaccacaccgtgaaagataacagtctatgaagacaaaaattacaaggtttagaatcctctttccttctccctcagacaactgggaaataatattctttaataaagttgtggttattggactagcacagtagccaaatttaggatgacttatttattcttaaaggttgggactttcattctggaagtacttttaactgttaaagattcctctttccctttccttcttctttccttgcctccctcatttttcctacattccctccttttttttcttgtattatttcattacacaaatgatcatttattccatacaaagttatggaatgtgtagggtgggtatgctggatgcaagggatataaaattggcacagcatctttcttgctgtcagttggctcacaatcgagtggaaagcaaagatgcattcagtgaatcattacaaaacactgtgatgtgtgcattacggttcatcacagaaggagttttggacccttactgggaagaggagaattaagagctgggtgactgcgaaagatttgcaggggagaaaatggctggagagattttgaaataagggaagggcattcccccattccagcatgcagaactaccacttgcaaaggcaaatacgattttctgcagatcctcccctaaccccaccccagaaactggggatatatatcattgggaagagatacagtttaatagagaggaaacactgttggaccactctcccaacacctgtttctcaaatgtgaggcagggctagccaagcatcccacatcaagagaagattaggatgggggaagaggtagaagtcaggcaggaagaatgtgaaagacaagtaccagtctatgaggctggactggtaggtaggaccaatacttaattttctaaatgcatgccactttccctacagatcaatgactgctagcacttccctacttgcttttctttggatttttttttctttttttttttttttgctactgcatgcttctttgactactgctgccaaccttgggaatggattgatgacccacttgcttctcaaacagctctgcagataccacttaggaagctggtgttcgtgttctcagactgaggaggagcagtgtccaaaatcaattacctgggatggtgtgtgctgatccacctagcaatgaactcagatctttggagcttgtttataacacgtacattgctcaacataccctggttctaagatcagtgatgctatttcagagcacaatggggataatacattttacatttatttaatgtgaattttggaaaaatttgattaaaaatgccacctttggcttttttaaataaagaaaatcacaataaaggatagaaagtaattaatgatttttaaaactggttaaccatatacaaaaatcaactcaagatgtattaaagactgacattgtaagtccccaatctataaaactcctaagaccttggtggaaggatctccatttcttggtgggaatgtaacttggtgcagccactgtggagagcaacatggagatttctcaaaggactaaaaatagaattacaatttgacccaggaataccattactgggtatatacccagaggaaaataaattgttctactaaaaagacacatgcactcatacgtttatcacagcactattcacaatagcaaagacgtggaatcaacctaggtacccatcaatggtgaattgggtaaagaaaatgtacatatacagcatgcaatattcacagccataaaaaggaatggaatcatatcctttgcagcaacgtggatgcagctggaggacattaccctacgtaaactcacacaggaacagaaaaccaaatactgcatgtactcacttatacatgagagttaaggcttgggaacacatggacataaagatgagaacaagagacactaggaactccaaaagaaggagggagaaaagaggacaaggactgaaagactttctattgggtactatgctcagtgtctaggtgttgggatcaatagaagcctaaacctcagcaacacgcaattatacccttgcaacaaacctgcacatgtaccccctgaatctaaaataaaaataaaagccaaagaggcaagttattttagtgattttaaattttctttattatagtcttctatatttttccatatttctataatgagcatagtgttgtagttagcaatagatggaaactttatcagaaaaagaagaaaatcatcacaaccatcaacaaacttacctgggtaatttctgtcctgttctcttacgaaagttgcaaaaataaaaaagacaatttcttgctcatttagaatgtacactgtgctttataatacatatggccactaccaatttcttgcaagtgttttttttagactctgggaatatagtggatgggttgagagaaaaggtaccatttgttaaagagaaaacagtattagactagaaattggggtaggatacagttctttatctttatcaatgatatagccttgaacaactcccttaacatcatagcatgtgttttgttaacgtaagacgggcccgataaagtatctcccatctgccagacaggatgactggaaagaagtataaatattttgtaagctgtaaggtgctctatctatgtaagttgtttttgaggcgattattcttagtaataaataaaatactgcttagaaactcaacgtggacagtcttggtctagggacctacttattgtgcaattggcaaaggggcccttctgagatgatgcataggcagacagtttagatacaaataactagaaatggtcaaactgtaatatctgtcctttcccaccttttacatctcaaaaagcagttttcatgtttcatagtaataagggcttttacatctataaattccctttcaaacgcctacatctctcaacaaatttgctaccaccgcaatttattttttaggtggttttattcagatgaaaatagtttatttgagcactttggagttgctgtttgagaatgctatatgagtattaaatactgtattatatttctgatgctctttaaagattttcttttctgtctgcaatttaattttgtttttagaggttttttctcctcctcttctcatattgattttatttttggcgctattaaaaagtgctcaatgaacaacctttttggaatgaatgtaaataagtctgtatctctatgtatatgaatatttttaagtgcattaacttttagtataagacttatgtaatgattaatttgctcctcaaattctaattcttattcaatcaataaccattgttcacaattttaaatacattttattgatttttgaacatttaggtcattagtagtaagatcaatgttagccataattcacctttaaatttccaatgttcaggttattaaaaatcatttgcttttatttccagcataatttatttttaattgaaattcttccttgtgataatttttctttttaaagcaaccatgtcttctttataactgtctgagtgtccaattacattttcttacttatgaaggtttttaatatctaatcatatcttatgtaatcagtgggctattgtgtaaagtaatagttctttttctcccttatttatagggattttactacacacttccttcctccctatttttttctttcctgaacacctttcacctggtattgtgatagttcatttacttgtatgtattgctcactagatggtaaactctgcggggaaaggaatttttttgcatgtcatgttcgctacatcattcctgcatttagcatatgcctaacaaatagtagtctagcaagtattttaaatggattaattaaggaactctaaactacaagacaccaaggaacagatgttcagataaatacataaagatataatctacatgacaatgaaaaggttatgttaaaagtaaaaccctgaagtgcattagaataaatatttaaaaatactatccaggacatataacagttgctatttttctatttaatgaggtatattttggatcccagtcagcaaacaactctctctaccaaaagtagctgactatagcccagcctgtctttgcagttcatggcagaagaagagcagagaacacacagggctcaggtccagagttagctcagagaaaacagaaaatccaatctcagcacagtaaacatgtaggaattcagcatctcatagaggttactgaaagcaaagaatcaaaaataataaatggttataaatagtccatgctctcagagaactttgagtgcataaacaaaacctataaatcttcagcaaatgaaaataaggctctggttaataaaacaaaacaaaacagaaatggcctagtgtaattgttaagaagaggagaaaaacataccccaaagaattcagtatgtagttggtgaattcagagcaaacaaaaatggaaaattacaccttctcagccacacaaaagaaaagacttctaaggatttaaattaagagtatcacagtgaggaggaaggaggagttgattattgggcaaaatattttgcctctatcaaggcttgagctcatgagtaaaaggtgtgcgaggcctccttccatagtgtgcattcagtccttctcaaagaatccattcatttccacattaaattctcaagtaaagaaatcaatcaaacaaaaaaactcccacatgtgttattatagtttctacctggactatgtggacatgtcctgtctgtctatagcagttgcaatgctattgcccagagtggaaaaaaagaaaaagaaaaggagcttcccataaggtttatttctacatgttaaaaactctattgctaaaaccctaccacactagcttaggaatcacatttttagtaaatgtcaccaacattttaaaaatttggggccatttttatcctctaagaaatctcgaagagatccagaattcatgtatttaaaatttgtctcatataacaaataaaagaaaaataaagacaatgaacagcttcacagacaaaaaaagaaagatactccaggtaaagccaaaacaatacaactttctaaaaataatatagaaaaacagctttatgacttgaaaataacactagccattagttattagtattagattgcaaaaatagctacaaatgtctctccttcctgaatctatgcccttgggcagtccacttccatatctatgctgggcttggccctgtgcctgtctttgaccaatcacaaattgctgcaatcaaaggcctcgaaagcactaggtcattgaggtttgccctcttttgctgctctcaggacatcatcttaccactgccatatgaaaaagcacaggttagttttcctggctgccaacctgccaactattagatatttatgagacatcatcctagatcatccaggctccagctgatgtagctcagatattagctgagccatcaaaagcagaactgtaaatcatgagctgaatcaatgtttgttgtatttagttcctatatatgggaagggtttgttatacagcaaaagctaactttgtagaaattggtacctagaaacggggtgctattataactaaacttaaaacacagtcatgtatcacttaatgatggagatactttctgagaaataggtcattaggtgacttccattttgtgcaaatataagaaagtatacttacacaaacctagatggtacaccctagtacacatctaggctatatggtataaacttttgcttctagactgcaaacttgtactgcatgtaactgtaactgaacactataggtagttgtcacaaaatggtaagtatttgtgtatttatacgtatctaaacataggaaaagtacaataaaaatgtgatataaacaataaaaaatggtatccttgcacttaccatgaatgggaattgctctgggtgaatcaacaaatgaatagtgagtgaatgtgaaggcctaggacattgctgtacactactgtagaatttataagtaggctaccctaaatttatttaaaaaatatatatcttcaataacaaatttaactttaggttactgtgacttttcaaactttacaaacattttaatttttaaaagcatttaaactcttgtaataacacagcttaaaacacattgtacagttgtacaaaaatattttctttcctcaattttataagctttcttaatttttaattttttttttttactttttaaacttttttgttaaaaaccataacataaacaccctcattggcctaggcctacacagaatcaggatccctattatgactgtcttccacttccacatcttgtcccactggaagaccttctagggaaataacttattcaaaagaagttgacaaagccataagaaaactgatttagctggctggaaaaagggaaaaatggtcacctgcagtaagttggagaatagacaacatgtcaaatgaacctacagaccttgacaagttggtttgtaggcagaattttccaagtgccatttggattattttgttgcctaagataaaggaagaaaagagagagagagagattagccaaagaaagatggcttattttgcaagtagaattcagaaagaataaggagggacaagaacttgctaggttggaaaataaatctattgctcatccccaatcttctgtttctaaaatattctaaaataaagtatgttctggggccagatgaaaagacatgttacatatacaaggcaaactataaagatgacagtagttttttcatcataaataatgcaagttagaagacaatagaacaaaatctttccaaatactgaaagaataaaaatatcaaactaaaattccttatccagtaaagatatatttcaaaaacaaagacaaaatagacatttttagatgtcaacagctgaaagacataacttactacaagaaatgttgaaaaaagtcattcaagcagcagaaaactgatgtcagtagaagcctagttctacacaaagaatgaagagcaatgaaagtagtaatcacatgagtaaataaaatatttgtctttattatttaaatatccttaagagataaccaattatttaaagcaaaaataatgatgatttgagtttttatcatatataaacataaaatgtatgaaaccaatcatacaaaaaccaggaacaaagaaatggaagtacactcttgtaagatattttttttgcacatgaagaaatataatatcatttaatgacagactgtgaaaagttaaagatgtttgctataaaccctaaagcaaacgctaaaataaaacaatcaaactttataattaatgtgatgcttaagtttatatgttaagtttatatgttaacttggctgggacataatatctagatatttggtcatactctattctagctgttctctgaaggtattcttgaatgggattaacatctaaatctttgagtaaagtagactgccttccataatatgagagttcatccaatcaattgaaagccttaagaaacagattgacctctcctgagagagaagaaattctgccataaactgtctttggatgtgaaccacaacaattgccaccccaccagtctaccctgcccatattggacctactaacctcacagacatgtaaatcagttccttaaaataaacttctatatatacatctatacacgttattgattgtttctctggagaaggctgactaatactactaataaaaatcaagatagaggctgggtgcaatggctcacgcctataatcccagcactttgagaagctgaggcaggcggatcatctgaagtcaggagtttgagaccagcctggccaacatggtgaaactctgtctctactaaaaatacaaaaattagctgagtgtggtggagggcacctgtaatcccagctacttgggaggctgaggcaggagaattgcttgaacccgggggcagaggttgcagtgaaccgagattgcactccagcctgggcaacagaacgagactccatctcaaaaaaacaaaaacaaaacaaaacccaaagcaaacaacaacaacaaaaacaaatagcaatgcaacatatgtaaacccaaccatatcaataattatctcatatgccaatgggataaatgccacaaataaaaggcaatgattgtcagactgataaaaagcaagagctaattatatgctaccaacctactttaaatatagagataaaaatatgttaaaaggctgaaaacattaaaccactctgtgttagtcaaaagacagttgaagtggcaaacattagacaaaatagatttcaaagcaaaaatattgtccataatgaagatatttcttaataaattcaagagcacagaataatcttaaatatttatagatctaataatatagattaaacatatatgaagcaaaatatgataaaattacaaagagaaatagatgcatcaaaatagagtcagaaatttcaacttccttatcacaatgtttgatagaattttagaaataaattcagtggtttataggacacttgagcagtactatccaccaacttgaatgaaataacccaaatgttgttgaggatgtaaacaaactaaaactttcatgtacatctaatgaaaagaaaaactagtagaagtatctcatagaatagttggcaatatcttaaaaagttaaaaaatataccaaccctgtgatttagacattgaaaatatacacatttacccaggggaaaagatagtaagtatttatacaaaaacctgtacatgaatgttaacagcagcattatttgtaacatctttaaactagaatcgtcctaaatgtccatttacaggtgaatggataaacaaattgttgtatatacctataatggaatagtactcagcaacacaaagaaatgaacaacagtgatacataaaacaacatgaatgaatctcaaaggattaagactaagtgaaacattcatattcttattttataaaattttagaaactgcaaattagtcatgctgagacaatgtagatcaatggctgtctgtgaatgagattggcaaggaagggaactaaggaaagattagaaacacaagggaatatttaacagtgatggatgttttattattttgattgtattgatgatttcatgaatgggtatattcatatgtaaaaactttcaaggtgtatactttaaagatgtgtggtttactgcagcagtccccaacctttgtggcaccagggaccagttttgtggaagacactttttccacggatggggtgggatgcttttgggatgattcaaccacattacatttatggtgtacttgatttctcttattattacattgtaatatataatgaaataattacacaactcaccataatgtagaatcagtgggagccctgagcttgttttcctgcaactagatgatcccatctgagggtgatgggagatagtgacagatcatcaggtactagattctcataaggagcacacaacctagatccctcatgatatggtttggctgtgtccccacccaaatctcatcttgaactgtaactcccacaattcccatgtgttgtgggagggacccagtgggaggtaattgagtcatgggagtgaatctttctcatgttgttctcataatagtgaataagtctcatgagatctgatggttttaaaaagtagatttcccctgcacaaagtctctctctttgcctgttgtcatccatgtaagacgtaacttgctcctccttgccttctgccatgattgtgaggcctccccacccatgtggaagtgtgagcccattaaacctctttttcttcccagtctcgggtatatctttatcagcaatgtgaagatggactgatacacctcacatgagcagttcacagtagggttcatgctcctatgagaatctaatgctgctgctgatttgataggagtcggagctcaggcagtaatgtgagcaattggaagtggctataaatacagctgaagctttgcttgcttgctggccactcacctcctgctgggtggcctggttcccagcaagctgtagaccagtatcagtcagttgtggcccaggagttggggacccctggcttactgtatgttaattatacctcaataaacttaataaaattatgtactctataattccacttatataaaagtaaatacagccaatagtaaactatattgtttatggatgcaaactttggatattgaactgtaaatcaaagcaaagtagggataaccttgaaagttaggatactgaataactctaagatggatggaaagatttatcattgggaataacatctggattctagtgaagttctatttctcgatctctgtgtgggttatgcgatatttgcctaacaaaaaattgtttaagctgcacctgtattcatgttgcataggcatataagtgtggcttagggcattcagagcagtctttacatgatctaacaacacaacactgacctgcacattctctaagtgggacatctgagtttcatttctttgaaatgttctttaaaatttttgagaaaaaggtgttaacaattctgccacaaagattaagactggatttggttaatcttcaggaaagcagaaacttgtttgtaactacttgaaaatccctttctggtatttgagctttgtgggacttttgcagtaatttacagcttgattttaaccgggttgaactttaatttaaccagttgattgtggcaagttatgataaacagcatgaaaaagaaaaaacaatttctttcataactgataatgtacacatgctgaggagaaagtgggactctgaattcttttggtgatcagccattaaatcataaagaagaggtgtcttctttatgggaagatagaatagaagcaagatcttcttaggtatgtgatcctgggcagatgactttattatacttctgtgaaatggtgcctcagcaaccacttatattttggctgtgaaaatcaagtggctataaatgtattaaaatacatccgaagcctatagccctaaataatgtagcaactctcaagttgcttttattaatatcagttttcatagttttcattctaatttgtcatagttttcattctaatttgtttgctgatttcttatcattattctcagtaatgcagtctttctctgaatcatagttagtattcttgacccagtgactcaagtcagcatgtctaatttcttaaatctgaattgtctgcaagatttcatcttgattctatcttttgggttgcgctcaagccagtgtaccaatttcacaatatctgctaattggtacattgttgcctaccatctttaaaatagcctgctctataactctagtttttttaaggaaatcaaaacaatgccattattataaaagttaatgacatagcaataacagatctattgtcacagtgcttatccactgcaagtgtccaatatatcttactaatttttcagagtttagtatttccactgttgaagttctttttatttttcataagatggttcacaatggacacagggctcaacattacagaagaaattgtatcagtctttaacatcttatccataaataatggcattgtaaatacacacacacacgtcaattataattgatataccctcatgcaaaagcattattaaaatctacaatattgatataataataccacctacatcattgagttctgaaaattcaatgagtgcatacatgcagaaagtttaaaataaagactaggaaaatgtgtcggatgttttcttctttgatcttaaagacagagataaaatgtacatattttcttagtcgaaatctaacttagtatatatctattaagttaatatttactctgactctcaaacattctgaatctcttagtggccaatcacttgtctaatgccacccagttggaaggagctaaaattgcttttttgttttttatttgcttgtttgttttttgagacagggtctcactctgttgcccgggctggagtgcgctggtgtgatcacagaactggtttttaaccacgttttgggtaataatacttcacaagaatgctggatgattaaatgaagtagtgtgtgtaatgtgttggctcattggacagaacactgggtgctgagggatcatataggagtctgactctgcctaactcttcaccttgtttaataataacactctggaaagctcatttatctatacatgcctttaaaagcagacaaagcatttttattgcttttttttttttttttaccacttccatggcctaaaagaatcacttttgttttgaagactctaatttgcagagtaaacaaaaaagatggaaataactaagaaataaaacctccaaaagtttaggaccccaaataaaaatcatttgaaatgcataaaaatgcataaaataggtacaatgaatagtaatagatggaaaaaaacagattccatcataggtttgttacttgaatactaaactttttcaataattagctgttataatatccgtgttcaaaaacacagcactcagtgcagatcaaaattctaaaataaacaacagttactttccattttctcttgagtaagttatgagattacctctattgctctaatctagaagatatgaaaacaggccctccggccctaactgactctgtgttgtgtaataatatttcccttcaccaacctttacaatgaatataaaaattcaatttcagacctacaagctagaaagggctcaagtgtcaccagacttttctaaggggatattttctgtttttgtctacatttatatttgactcatttagtggagggaggtaataggatttttctatctgctatagaagctatttcagaagtacacagatataaggtcagaaaatatattttaaaatcacaaaagaaaacaaaatgatatgttggttttgaaccctagggtctttcaacattataatcaagcatgcctgagaatatctagctgtgacttcagagagaataatagtacacccttgagtctactgcaacagtcttccatggtatggtaggaaaagaatcctaggatagctcccaagacttacaagatacacacctcctggtgtgtatgccctgcataatctctgggaatgtgaatttaatggattttcctctgcgattaagtaaagctatgtacactatacagttgatcttaagacagagaatttatccaggtgggtgcgacttaatcacatgagacctttaaaagtagagcattttatctggctgactgaagaagaggaaaccagaaacggaaagcaggaaaagaatttgcatcactcttgttggtttaaaggtagaggggatagagagcaaggaaagtgtgcagtactccaggagctaagagcagtccctggctgtgggtcggcagggaattaggaaactcagtaatatagccacagtcaactgaaatttgccaggaagaatgatcttagacgtggattttcctccaaagtctgcagaaaagaactcagctttgcctatacctggattttggttttgcagtttctttggaagataacacagtgatggtgtgctggacttgacctacacaattgttagctagtaaatcagtgtttttagcctctaagttggtgataatttgctacgcagcaatagaaaacaaattcacatggcttggatcctacccaaatagtttttattatttcattaattcatttgttcatctctatatttatttctgaacacattcattaagtgcctatcatgtcccttctctaatcgttatgacgagtttttaacatacaagacaattttatgaccctcaccttaaagactatgttatcaggatactggaatgtaacattatttactgttcctaaacattatcaaatacacatactgcagatactctgaaagttgtgaaagctttaaataattcagtatgcagttttgtggctcatatagaaagcttgatgggccttgtgaaaagctgtaggcattgcccatgtctaaaggataaaagcggtagatgacagtactccatgtaattattttggctgtctcacaggcttattgaaatttccttggagtgacatcaacaagatggctatctagaagctcctagcatccttctttctaccacacacacacacacagacacacacatacacacacacacacagacacacaaaaaagctatgaataatcaagtactttttgaccaaaataactaaaggagagctctagagaatagcaaagaagcagcagaaatcctgtagagcatagaaacccaggatggctgcatagggaagggaaaaagatacctcgcctccgccactccatcccctcagttggaatcagctcagaaccagggaggactcctttctgcagggaaaaataaagacgaccccagcaattctgattgccactgcagacacctgcagcctttgttatcagagactcctacagtcctcacaagctctaaactcaactgagagagctccctagagtcacatgctgagctatattcagagaaggtgacaacactgtgccctggcctcacttctccccactgccccctgtcccctatcctattgcctgtactgctactgcactacaccattttggaaccagagacactactagagtgcatcctgctctgggggtgaaacccattgcaccaccctccattcctgagagtttgctgctattgcaacatgcacactccatagtgtgccatacctgagccaagctgctactgtgccctactccctagggccaatctactatatagctgctccatcctgcccattctagttgctggggcacctccacttaaggccaacatccagtgatggtctgccagcaggggatttcagatattctgcacaccagagctatcaactgcacctcaccttctagcaccacaggtgaggcagcttcctgaacctagagactctaataactctggcataccagactagttgtttgccccagcatcacagctgatacagtgccctgctccccaggcatctggcagccccactaacccacatagccatgctttctggagctgagaagacatagtacctgaagtcccaggaaatcacaggagctgtgccactaccatctccaggacaaagagccacagttcctgcatacctgtaactggactaacctccacccatctgagctggtgagatgtcccacctttccagggaatgaagtcattgctgtgctgctccaccaccctcaatcccaggcccaagccacagtggtgccttgccattcctgagtacttgctgttactgtacccaggctcacagagcctgggcttctgtcatgtcccaccatcccagggtccaaactccacactatgtgctatctcatccctcagatcctgagctgcttctatgtcctgttggttccaggatctgaattgtagctgtgcactgttccgtgaggatttagtctctggaaaatcccttcttctccagagctgcaccagtgctgtaccctgtttcccagggtcagaacatagctatattacagcctcctgggtttaagctgctagagtttgtctcaaagcaatagatcccagctttttgggagaactgcatccacttgtgcctgggaatgtgaacctgtgtctcaagtcccaggtgttacagtaatttcacaggacgccccactgtgggggaagataagaacagaatgattcccaaagttcttgccataataacatacatagccaccattattgccacaaattcctgtagcctagaccaccaaggtaccaaggtatgtcagtcatcactgacactgatcacaattgaagaagctgcatacagactgtatcactgggcccacacagaactacagccactgcactttgcccaaccagtaccctcaggcccaccttcggtgaaagcctacaaaagctactctgtaaagtttggaagaggtaactacacaatcagatgtgcagacatcaatgcaggaacacaagaaacacagaaaacaaggaaacatgacatcaccaaaggagcacaataattctccagtaactgaccccaatgaaatggaaatttacaaattgcctgaagaggaattcataataatattctttattattaacaagacacaagagaatacacataggcgattcaatgaaatcaggaatataattcattatctgaatgagaaattcaacagagagatataataaaaaagaacagaaatcttatagctagtgaatttaatcaataaaataaagtttaaaaatacaatagaaagcttcaatagcagactagagcaaacaaaggaaagattctgtgaacttgaagataggtcatttgtgacttggtctgacttagaggaaacaaaagaaaaaggaatgaaaaagagtgaagatattctttgggacttatgggatatcattaagcaaataaatatttgcattatgagattttcaggacaagagattaaaaaagggacaaaaatgcttatttaataaaatagtggctgacaatttcccattttgggagagatatggacattcagattcacttagctccaaggtccccaaacatatataacccaaagaggttctctcaaaggcacattatagtaaaactgtcaaaacttaaagacaaagaattttaaaagcagcaagagaaaacatcaagtcacatacaagggaatctccattagaatatatcagtagatttctcaacagaaactttgcagacaaggagacaattggatgatatattcaacatgctgaaagaaaaacctttcagctatggctgttatacccggcagagctatccctcagaaataaaagaggcataaaatattatccagacaagcaaaagctaaatccatcaccactagacccatcctaaaagaagtgcttaaggaagtttttcaaaaaaaaaaaaagaaaagaaaaaaggcattataattactgtcataagtatatatgcaactataaaactcactagtggaagaaaatgcatagtcaagttcagaatactccagtactataatggtggtatgtaaattatacatctgcttagtatgaagattaaaagtcaaaatggtcaaaataactacagcactacagctacaataagttgttaagaaatatacaatatgaaaagatgtgtgacatcaaaaacataagttatagggggtggagagtaaaagtctagagtttttgtatgtgatagaagttaagctgttatcagcttaaaatagctgattaaaactataagatgttttatgtaagcctcatggtaactgcaaaacaaaaaacatggcagatatacaaacaataaaaagaaaggaataaaagcttaatactacagaaaattataccacaatgatagacaacaagagaggaagaaaggatcgacagagctacaaaacaactggaaaagaaataataaaatgacagtaagtccttacctctaaatgataacctagaatgtaaatagattcaatcctttaataaaaagatggagtggctgaatggataaagatacaatccaattacatgccgcttgtaagagacccataaaagacacatgtaactaaaagagagcaagagtggctacagttatgtttgataaatcagacttcaattaaaaaaactatcagaagagacaaagaaggtaattatttaatgatatagtggtctgacaatcaagaagacttaaaaattgcatatacatattgcatatatatatgctatatatatgctatatatatgctatatatgctatatatatgctatatatatgctatatatgctatatatatgctatatatatgctatatatatatgctacatatatgctatacatatgctacatatatgctatatatatgctacatatatgctatatatatgctatatatatatgcaatatatatatgcaatatatatatatgcacacacacacacgtctccaacattggaacacctgaatacacaatgtaaatagttataaacctgaagagcaaaatagaaatacaataatagtagggaactttaatactcttttcagtaatgaatagatcaaccagatagaaaataaatgaggatataatggactcaaattgcacttttgaccaaatggaccaaacagacatatacaaaactgtccatctaatagctgcagaatacacaacttttttcacacatggaacattctccaagatagaccatattttaggccacaaaacaaggttttaaaaatttaagaatatcgaaatcatacctagtattgtttcagaccacagtagaaattagtaaccaagggaatcttgaaaaattaacaaaaaacgttgttgtggaaattaaacaacatgcttaaacaacaaatgggttgaagaataaatcaaaagagaaattttaaaaatatcttgaagccgagcgtggtggctcacgcctgtaatccggcagtttgggaggccgaggcgggcggaccacgaggtcaggaggatcaagaccaccctggctaacacagtgaaaccccgtctctactaaaaatacaaaaaatttgccgggcgtggtggcaggcacctgtagtcccagctgctcaggaggctgaggcaggagaatggcgtgaatctgggaggcgtagcatgcagtgagcagagatcgctccactgcactccagcctgggctacagagtgagactctgcctcaaaaaaaaaaaaaaaaaaaaaaaatcttgagataaatgacaatgaaattacaacataccaaaacctatgggatgcagccaaaccatttctaagaggaaaatttattgcaataaatgcctacattaaaaaaagaagaaagatctcaaatagatagtctaacattatacctaaaggaactagaaaaagaagaagctacaccaacgattagcagaaggaaaggaataataaaaatcagaagtgaaataaataaaatagccacgtgcagtggctcacacctattattgcagtgggtcatacctataattctagtactttgggaggctaaggtgggtggaatgccctgagctcaggagttcaagaccagcctggggaacatggcaaaacctcatctttaccaaaaaaaaaaaaaaaaaaaaaaaaaaaaaaaaaaaaattagctgggtgtggtgtcatgtgcctgtagtcccagctacttgggagattgaggttgggaggatcacttgagcctgggaggtggaggctgccgtaagctgagattgtgttgcttcactccagcctgggcaacagagtgggaccctatctcaatgaaagagaaagaaagagagaaagagagggagagagagagagaaagagagagagagagagagagagagaggaaggaaggaaggaaggaaggaaggaaagaaggaaggaaggacggaaaatagagaacagaaaaaccatagaaagaatcgagaatatatttttgaaaacaacaaattcaatatggaggccatttgatttatgagaaaaaggaggaaattctaggaccatgctgaatgggctctgatgttgagtctgccattttctagctgtgtgactctaagcaagttatttaatatctaagccttatctataaactaaggatagtgattacttaattcccaaagtagttgtgatgatcaaatgatataaattcagtaaaatattaaaagtgatggggtaggatagtaactcaagtgtaatagtgatagtgatactaacggtgactaatattagtgagcaaacatgatgttcccaagactgcacaaattattttccatgctttatctctcatttcctatggtaagtgcatcagataggtactgttattttacccattttgcagataaaaaccaaggcacacagtaatccagtaatttgctcatggtcatgtaaataaatttgaacccaatttcttgttagcactctcttctccttataatgttctttttatcccttcagtaaaaataagtaaaaatattaatgtgtatgttttaccacactgctgtactttagcatacagtagacattgtgaacattttaaggtcataggctgaatttccttcatagaaaagaaagattactttctttcatatatatattctatatagctctttttcttctaaaaccacatatctacaaccagcttggaatatccttacctaatatctttgtttctttttctcctccttctcaaaatctttttctctactagctctttcttcattgtttattaaacatttcttgcccttaagaaagcaccttttgttatactctctttctacttgattgggtgtgtattaatcagtacatactaggttgctagtgtcagaaacttaatgtaacttaggaaaagtagaaatgtatttatttacggaataaaacaattaacaagaagagcaggtctatagttggataacggaaacaactggatcaaaatatatgaaagtcatagggaatggaaacctcatctctacctttttctgatactcgatttaattttctctgattgcagaccagcttcctctgtgtggtggtaaatctaactgacacaattctagagcctcataaatgaacagtttcttctaatggcaggagcagagtcgtgattctggttccaaaatttcccaagaagggttctgattggtctgatttgggtctgtatcccacatgcttgctgacaagtaggtagtggtaggtcaggtaaaatccatttagctcctactaaaggcatgaggatggagaatgtaggcaaaaggaagttttcagacatcaggaaaatactaagcagaaaatatcatagatgcttccttttttttttttttttttttttttttttttaaagaggcagggtctttctgtgttgctcagactgctcttgaactcctggagtaaagagatcttcccacctgggattcccaaagtgctagtattacaggaataagccactgcacctttctgccttctcctcttaaagttgctgttccctttaatactcttcttctattgactaaattttgccaagctttgtaactgttctgagaaatttctttgaatattatacttgtcatctgttatctcttcaccagatatttttctgtctttttttcttatatagaatttgaggtttgggttggatatttgaatatagcaatatttgaccatatttatgagaaattacttgaaactttctgctacattcagcatagagaagagttggtttataaagcatctggcttattggagaaattttttccttcagtttctttcccaataaatgccatttctgctaactcttgattagactacaaactgatctctgtaatacacagacaagtcctataaatctgtctttaatggttctcattcaattaaagtcttttcattgcttaaatctttctttcctcagagtagtagaaaaatttcaaactgaacggatttcaatttcatctccttacctggttcaatagtggtattttgaggttggctggctgctcaaaagaaatttttgttcttgaagtcatgtaaatgtactagggtatgtttaatgttgaccatatgagtcagtttttcctaaggcatgctgtgctttgacaatatatagattcaaatcatctactatttcaagaatttgaaatactactatttctgaattatgtttttaaataataattctgttccattatttctagtttcctttgggggggctttctttaatatattctttgcctgttctacattttaattactttttccgtctaataactttttaaaaatgagtttctttattgtcactttgttttgttgccttttaagtcctctatgcaccttgctgtatttttccttccttatatgtcttctaattttgcctttaccttttttgagttttatttcttttacttttatttcctgagatctgctagtttccatttcatgcatattgctgtttcaccatctctcttgtgtgcttttttatttctgtactatgttcttgctttacagaggcaactacttcaatgcattttactcatttgttttaaaatttatcacaaaatatttgaccatagttttcatctattttgttgcaacttgttttcttttcaggatactttgccatttgaccttcttatttttttttaatttattttccattatattattatatagatcctgttcttccttgcttcttgttttactgcttattatcaaaggacatgaattttccccactagctatttgtaagcagtttatatagggtgggttgggaggtaaaacagaaccatgcttagggctaaaaattactcaatatgaactaaaaatctgaaaaacctgaaaatactcactataagaaaacaatttcaaaagatattaaatatctgtaaaaagttttcaaagatatctggtttggtgagttagtgtttccaattatgttagtaagcagcagaactgggttttgaaacaaggggtatggatgtggattctgcaatgtttacccaggtataagaccaaatgaaactagcaagttaaacataaacaaaatgacagagccaattgatatccaactagtaacattcatttaatctgataaattctgctgttttgctgaaatgaaattgcccttcataaggtgaatatagatgagaattctgctccatatggaataaactcacatcattgtgagtttatatggttctgtcatcactgtgggctgtgtgctgagttaattctctcaccattttttaaacaactgtgaaaccttcctttgtagagttgcctttatgacatttatgacatttggccaagtcatttagaccaagtatgtcatttacacttatactttggtcatttagaccaaatatgtcatttacacgtaatgttagtcttctttattttctcattagctcatgtcagtataaatggaactacttgacaccaacataaacattagtgcaaagacaagtgtgaagaccctgtaatcacatggcacttttcagaaatatgaggtcatccagtgattctacaagaggggttggcaaactgcagcttgtaggccacatccagtttacccctatttccataagacccatgagttgagaatagtttttacaattttaattgttaaaaaaaaagaatatgcctcagagacatgtgtacttctcaaagtctaaaatacttagtatctggccctttaaaagaaaaaggctgctgatccctgtcctagaatatacttatgtcatttttaaaaatggttattatgagatgaaagcacaaaatgaaaagcatcttttagaaagcttcaggatacttgggaatactttttcagaaagcagggaagaaaacacatttctacctactgaaaaatgtgctcagtaactcatccccaatatttgtgagttaaaagcacaaacagaccattacgtgggagaggcacaacaattcttggcactaagattaaatagaaatcactcccaggattgtcataaagaagacactatggaagataacgatgtcttcactggcgcacctacagtacatctaacaagtttcacagggcccttttaaaagacaatttaaaatatagcctgatgacaacattcctaaaaacaatgtagtgaaggcagttttagagaacttgagagtatgggtcagagattttcatttctattaatctgactccatgcaaggctagattgtagactctggacatatgaagaaactggaaacccttaggacaaatctcttttttggtaaaactgttgaatatatgagtagataccctgctacacaactaaaggtcagcttttctatgttgccagctgaattcatcatacccatttcacattatcattacagaagagcgtgacaatgcaaaattctggagataagatcaaacatatgaataacaacatttaaggatgccatgaaggctatttgagacaggtcctctgtccatgtgatgcaaaaatgacagaggacacatcagacataatttgtcacaacccaatgacattcatgtcagtaggtgctgagatgtaatctgtcatgttttagttagaggaaactgtatgtagctcttttgatggattgataagtagattcatccatccttatactttgaaagaacataattattcataattatttgcatgtagttatttataaacacaaccctttacattttatcagtaaatgtcaagagttgcctcactcggtgcactttatgctagtttagctaatttgcttaaattgggatgcccagagcccaagtatatcctcttgtgtcctgggaaacccacccttgccctttgttaaaggagtagcagttccatacgctggatggattgaggaatttcccattattgattaaaggtcaactatactctgggttctattaaataggtacacatgaaattaattaagatgaactagttaagacaggttcaccatttggagccactctcccccatctccacctcatcatgcaaatcttttttatggaagctctattcagcttagatatttaaatcagctctcagtaacttatctaccataaccgtttacttagttgtcctctctcactctcagcaaaatcaatgagctaaaaagattaggaaccatcattctttgtatttccagcacccagcccagtgatggtgtgaggacacatctgttactccacaccttctattctcagcacaccttaagctaaaacaacttgtgtttctggcacagctatcggagactttcagaggtgacaaactcatgctcatttatttagttgcctaatttctccagtgtcagtaataatctatattcttagcaaatcattgggaattggaaaccactctgacagattaaggccaggaaattttttaaagaagaaatgcaagaactggaaattacatatgtgaccttgtgccattcagcctgtgaatggtgtgtgggcttaaaaggttgttagggttgggatggtagaatatgtagagcttttggagaatgttttttgttactgttgtttgacctacttcattcccttcagactccgagaggtcataacacacgatataaagtgcaaggttaataatggagaatgtcgcattcaggagtttctctgcctagatgtggaattctggcttataggctatttctttctgtgtgtctctttctcttcactcttgaaataagttaagaaattctcaacgactggaatatatgttttccaccttttctggccatcaactgcgttatcaggatgaatgtcaattactgtcattctggaagtcatagggtgcattatcctgttttcctattataggggtatttgagtaataaacttactctcttgtaatatcatataaaattttattttaactgacatctaaaagcacgaaacctcttaaagtttggcttgccccatggaggtgaatgcagctgcagctcatctcaggagtctgcccttatatgaactgcttgttcttacctttctactcctcagcatgttgaaactcagaccacactcctaaatgagacatccaaaggctccggcctgctggagtgctgacaagcatgctgtttagggcaggtactcagaggcaaagtcagagaaacatgatctcttcagcagcacgtttttgcacatgaaacctgtgtaaactcagcatgactcactcaggccaaggtgagcactctgatgtctgtgaacgactgcagcaacttggcaactggggccagtgtgcttccctgtagcactcagcagagacagttcaggacttgaaacaattttcctcattgctgttgtcactggagaacaaaaactgcaaaagcgagccattgttcacactgaaagtcattttgtggagaaaatgagaggcttggaccagtctttttgtcctttattgtatcgtcccctctggcatccatttatgggtctgatttcatttctattttcattttgagacttttctctatgacctcaggtcagagacaatatcaaaggcaatatgttttagtgggtttatttgtctgagtcaacagaaaaagagagagggaagggaaatggaagagtacagggcaggggggaggaaggggggagagagagagagagacagagagagaccaactgagactaaagctatgtctgtatgaaaagatgactatagttggatctggaattctgaatttgcaactaacactgatgccatttacaatgtaacaatcagctttagtcttccatgtgaatgtagatattatatcatcatctcataacattttattccatatacatggtcaccaagatgaacagaaagagttagatctgggtggtgagaactgggagaaaaccagccatgagaataagatggattgtcttttgtcacagaaatagcaaatttttaagtgtatttgaaatgataaatacttttttttaaccttttgtaacatttcacaaaacttttaaatcaaatttcaactggaactttggtctgctttccttaaatgcagctgatttcttgctaaattccattgcatttgatgccttcagggatttgggaagttagcgtactgggacagaggcattgatgatacatatgacgtggacaaaggaaatgaactcagcatatgtgggaagtatagcaagtgttcacttgtggccagtgtcaccaaaaatgccaccaaggtaactcaacatagtcaaagtaatgaggcagaattgttcttcagttaacttgttaatagggaaactttttataagcctaactggtctagtgatatttggtccagttctcaaacctatcttagaggcttccctgtctcatttccatagggaaaaaactccctatccaattattaaatggataaataagtgcttaaaacgtgaaaaatagggaaattcatgctatttgaactagtttttgcttaagtatgatatggccatggcaccaaacttcagtgtgtatttaggatcaccttagatgcatgttgaaactatacacatacagcctaagctaatcctaatgaacctgcttaagttggtcttgagtgtggcctaggaatttcattgtaaacaagtatcccagatgattctgatgcacatagatgcattctgatgtgtgtgtgcatgtgtgtgtgtgtgtgtgtgtgtgcgcgcgcgcacgcgtgcacgccagaggggagataagggaaagatttcaagttaaaaatgggtttgggttactttgtgaaagaagttgaatggcatgctaaggagtttgtgtttttaaataaagaacaaacgtgatcatatctgtactttgagaagtataactctggtgacaggacggtttgaagagggaggggagaggagtcaagaagactagttaagaagtttttcaaaagatgagcacttccgccaaattcttcatcacacattgtacaggtaataaataagacatggttcctttcatgaagttgcttatgatcttgtaggaaaagattcaatgaatgaggcagagatggagaagtcagagaagtggcttggatgggcaggttggggctggacagattttgcagagctttaagaagcaaaggaagagcagattcccagaaaagaatataccctaagagacaggccactaaattaaatgacagtttgatggtgccacttttttcccccactggggtgtctggactctacagacttacataaatgagcagtgagaaaatgtaagtacagattattgattacttttggggacatgtttgcgtaaagaaagacagagctaaaatagcagcttgaagatatcaaaggctaaggaaaggcaatttttgtgttgttttgcttttgttgtgagtctgttgttctttataggggagattggaatatatttccaggaaaaagggaaagaaaatccaaaacctagagaagtgaatgttggtggggcaaagagaaagagagcaggaatgagaccaggagggcaggtgaggtgaagaattcggtattgggaaggaagagaccagaaagctgaagaggatggatggctacacgatacctttgagactgggaggaagcagcaggagaaagagataaagaacaatgagagatatgagttagacactgggatatgagttagacactagtcacatttcaccaagggaagagtccaagcttaaacatatttttcatgtcgcaatatgcttagggaaagctggcccctttccgaatcccggaggatgaacacgtgattgatctaaacacggcatagctatcccattctcttctattggagttcggtttggggatgggcaagtgaccaactttaggccaaatattaaggagatttcttctgagggtacttctgggaagtatttgcttcatgatatatacatttcctcccttgaacttgatagtataaaggcataatgcttgggatgagggaaccatcttggaaccatgaggtgcaaacttaaggacctaagttaaatactaaggataggggaggagaagaaatctgagtctaatgataaccttgagacagtgtggtatctctgggactgcgtacctccaatttcttgtttgtgtgtgagtgtgtgtgtgtgtgtgtgtaatcaaacaataaagaatatatgtatgttctttcttgtttaaatcacaactattttaattttgtgatatttctgttaaaagtatatgtaagtgatgttggaaaaattggtctccatctttttattaaagaggtagtcatgtgcccagaaggatggaggcccacctgtgatttagggttgggatgtgtggaaaatacctgaagctaccattgaagatactgagaatggcaggaagctaatgaaataaatcaaagaaaggcagcataaacagacctcaaataaagtaggactggatgtggacagaatgactttgcaacattgccaaacctcaacaaaggggcaaaaaaggatagagtccttgttgaggagggtttaaaattggataccagaacacagcatcaacccaaagtcaaaggcacaaaggtgtcattgaggggagcaagggcagatttaaatgttttatgaaggagcaaaatcaggattaggattggatagtgcttggacaactcatacaatatgtttttgcctcagttttgtcattgctaaaaagtaaaattaacagctagtgcttaggtttttgtgagggtaaaatgggataatgtataatttattttacatggtatctaacatatttttaagaactcaacaaatgtggtaataattagatcctgaacttctgtcaaagccaggcaggggggcactaaagaagctcacacaacagaaataatgtcaaatataagtgcgacatatatatttttaaaatcagcaagatgtataaacaattctcactattaatactagtaagtttcttcaaagttgaacttaggaaacaggaaaaaattggcacagaacatcctgtgtatcttaccaagataaattccaaataaattgcctgctggcagtacccattaattatttgccgacaatttttcagccagcacatgcttttttatttagctggtccagcaagtcactgcagttgtagttgttcatcttgtcacaggactgggtagaaagccaaatgcagaggtatgagctgccaagtaacccactatctgtgcagctgtggggaggaaccagaaaacctcaagacttcttgctgcttccattttcctagttttttttctctagaacctcatccacatcgtatggtgctgggaagggtcccacagcgtcagtgtcttctatgagtttgttaaaaatgcagactcccaggtcccatcccaggagaactgaaacagaatttgccttttgataagatgtccagatgatttgtttgcacattaatgtttgagaaccactgatatttaggacttatctgaagccacctcacaggataggcagagaatcgctgtttcacccaaaggccctctcatttccttgtcatcccttcatgatgctggatgtggggttcttaagtgagacctcatcttcactaaatctctcattgctgtgcccactgaagccagccttcagttaccagggagcattgccttagaccactttaaccagagagcaacaagctcaaggaaattgtatgaactcaggtgctagacgttcctgggtttattctaggctctgcctcatattagttgacctgggacaaattaactcaactctgtgattgcacctctccctccaagcaagagcctctgcagccctttttcgtaactgttgacccttttctgatggccatcacaggtgggaccaagggagtacactaggggatattagaggaggatccctaatacaagattggccaataagctttgcttcctaggacatctggatttggaaatcagaatccactagttgcctttctcagtgtttgagcaaagaagaattataggacgacctggagaaattatttctcagcaatgggctcagagatacagaaaaaaacaaagacaatatggctgtagaaatatcagtcttcatttctgatagttttctaattttggatcctgctgtctactgaagtctgcattctgcttctgggttccatccctttattcatctaataatttatctctctctctcgcccacactaaattaaattccttaaatccacacagtcctgacaaagcaataagctttaatgaatggtagttaaaatgattattattgctactactggctgatcaacttaatcattattattgtaatgcctcctatatcagctgttttttcattcaaacatagtcactgataattgatcctcaaaatggtaagaaaaccaatcatctgaatcactaggaaaaataaggaaatactattttcatatatgtttatgtattcactattgcattgatgttcaaataattaatttaaaatagaatgatgtctaccataattatagagcacagtggcagctgtcatttaagagcacattttaggcctgaacccctgcaccactgagggaaggaattgtctcagccttcaagcctatcgtgtcccatgttattactcagatatcacaggagacctaactgacatcaggaaggtaaactcagtgacccaggaaacaaaactgttaagttataaaatgatgttaagaatccttgattccacttgctgctgtgggtctcatataatatactcccctccaagcccacagagccttatctcagctggcagcgatctggaaacctacctgttacattaatcaaaacatcttactggaatgctaacttcttgcaaagttccagctcttttcatcaaaaccaattatgtatgaaatgttagacattgtccagtggaagatatatattatcaatattaatgataaaaatcacaactaacatttagacggtagcatgtatcacacccctttgaaaaacgcaacagtattttcagctagtcatcattttctacggttttgtagtgagacatgtgagacttttaagaggtcaaataactttctcaaggttcccagtttgcctgttgcaaattacacttctctgacacatatggatagctctgtccagtgaacactcttagaaacctttaagtaggctgggagtggtagctcatgtctgtaatcccagcacttttggaggccaaggtggatggatcatctgaggtcaggagttcaagaccagcctggccaacatggcgaaactccgtctctactaaaaaaaaatacaaaaattagtcaggcatggtggtgcacacctgtagtcccagctacttggggaggctgaggcaggagaatcacttgaacttgggaggcagaggttccagtgatccgagattgcacccctgcactccagcctgggcaacagagtaagactccatctcaaaaaaaaaaaaaaaaacctttaagtagaaggcagagcctttctcaacatgctacaccattaaaatgtcacatgttccttttttgagaggtagggagaacactttagggagaaattgtctcttcttcagagatgtggctggcaaaaaagcaaagggaagtcgggacactttccaaaaaagcaagctacgtagggcgcagactgcgggcaagacaaaagacctctccagccatcctgaaacattaaacccaatttccttatccccagcaggtatctggcacaactcgcatcattacaattttctagtgtactgagctggggaaatgtttccaaaggaaactgagtagttaccaaaggaagagttgaagacactttgccaattctcttttcttaaggacttagtaactcagactttttaaggtaggaaagattttgccttttgaaaataactagagtttttgctaccttgacaattttaagcaacactgaaagaaccgtggaggttgtataaaccatttgaatttttccgtcatagacctaataatcaggactctggaatggatttcatcttttcttatcaaaagggctgctctcatgctcaatcagctattctgtttcttttcaaaaccgattttgtgttagccatggggagtcaggcagtggattgtctaaatacttttatacagaaacaaaaattcatgcttgatgttcaggtcagttttacagagttgtaatttagaggcattcaagggagtttaatggagaaggaaaccagtcaatattttattcaatccaaacatgaaccaacattattaagtcgaggaatctttctgctgagaaaataatgtcacaaaggttcagtcaatctctgggagaggaaggagggttcataaaagactgcacagtttacatgtgttgtgggaatttaaattttagtaattcttgatgcagaattggacctgtggaattagtcccattttacctccataggaagtgttcaagccagctttctaagcagatttcaaattctgcgtttaattacatttcctaaaacccttagtttgcacacacagcccatgctactctggctccgatgtccttttcagttgctggttggcccttcttcatcaggagccctgttctcgactaaaacccagctccacgctgctcccatcctgctaggcatggtcatgatcatcccaatgcctgcaatgccccctctctgtccagggaatgctttctgatctttaaattcctgaatcaaatatcaccttcccccttttcgctcctcttatgctgcctaacaagcttaattattcttatttctctgttttacctttgctatcaccttattgccatttatcatggtggctcattttaccttttttttttcttttccttgattacaagctctttgaggatcttttttttttttctttcctgcctggtcagtgttcaatacttactgagtgactgaataaatatatatattagataatgcaattactatggattttaaaatctaagatcaaattattacatttgttgtataatcagatattttctttgaaaagttattctttctccaaccagtaactcctctgagcaagtggtgcaagcactgcctaacttcttgagcgtagagtatgaggagaaggagcagttgggtacccacaattgtcaggataccaataatctgaattgtgggtaaaaaaattattctttagagctatgcttttggattcatggcaagttgatgttcacagggttaactgaaaataaatgtctactgctgttgtgcactgtaaattgggtgcaagttatatggcctccactgttcaagatatatgatgagtcgatttctaatgattgcaatacctcatgagataccttacccactcagttttagagataggaaatttgaggttcagaggtgtcaaaatgatgtctccaataccaaatagctaagtaaatgttgaaactaaaaggggagccccctgccaaagacatcctatgagtagcaatagaatagccagaagggcagagtattggggtggtggtggtggtatcagttctcatgattttaacccaaaatgacagtctaagaaggaaagttagcatagaatattctggtagatatcatgaaactcccactccaacttatcagaagaaaagcagcccttttcagaagcagccgactctagcccttggtatgtcttgtcagtggactggctcagatctcataatagtgccatcccttgggggactttttggaagctgcaaacctcccgacagaagcgctgtctaatgagagcctcattcctccaagtgctaagggcaagagtctgggcagaaggatgtgtgtagtgctgttgtgagagaactggttggtactgacacctgaaaaatctccactagcttttctgcaaattataacattaatatgcttgagttcagccattgggaaattaaacctaatgtactatagataaaagattgtaggccttattcaaaataagattcagaattaaagaagactatgcatggtacctccagaaacactatgtataatattaagtattccagaataatcataagaatgcaactaacatttttggatatttacatgtgacaggcactatgctagtcattctatatatattatctcttttttttttttttttttttttgagatggagttgactcaccacaacctctgcctcctgagttcaagcgattctcctgcctcagccttctgagtagctggggttacaggcatgcaccaccacatacagctaattttgtatttttagtagagacagggtttctccatgttggtcaggctggttttgaactctcgacctcccaaagtgctgggattacaggcgtgagccacagcgcctggccttatgttatctcacttaatcctcacaaagaacttatgatatacacaaacactatcattatctcgttttacggatgagataacaaagttacactgttaataactaacagaactagcacacaaactatattatgctgatctactcattttccattcaaattaattgaggactgaagacccaaagatgaagggacacaacatctgctcccacagtatgatagggaaatgaataaaacaaaccaattgttcaatggaactatggcactatggcataagagagaggcagaaatggtctggtaggctaggggtgggcaggggggatttcggagctatctgagacttggaataataaaaggagtttctaaggtagaagaatcaaattataaaactggcaaaagaacatagcatatgctcagagaatgatgggttgttatagtttgaatggatgaggtccctccaaaattcatatgttggacctgaataatcaatgtgataatattaagagatgtggccttttgagaagtgattatgtcatgagtgcttcgcctcattaatgggattagtgctgttacatgagaggttgaaggaagcactctaggaccttcagctcttccaccccttctaccatgtgaggacacagcattcatcccttctggaggatgcacttccaaagtgccgccttggaagcagagagcaagcccttaccagacactgaatgtcagagccttgatcttggacttgccagcctccagaactgtgataaataaatttctattattgataagttacctagtctcaggcattttgttatagcaccaggaactgctggtaccaagcagtggggtgttgctgttaacaaatatataaaattgtggaacaagataatgcagagaggctggtagattttggaaccgaatgctagaaaaagtctctattcctgtgaataaagcattaaggcagttctggtgataactcaaaagagaacagctgtaggggaagccttaatcttacagactacttaagtggttgtgatcagaatgctgatacaaatatggatggtaaaggcaattctgatgaggccttagatggaaatgaggaacgagggattgtaaactggagaaaaagccatcctgtttataaagtggcaaataacttggctgaattgtctgtgtcttagtgcttagtcagaagctgtgagcaatgaactagagtatttggtggaagaaactgctaagcaaaatattgagggtatggaacagcttctcttgactgcgtatagaaaactgtgtgtgagagaaacaaattaaagatggaatttatactcaaaaggcaaaaagaactcaaaagatttggaaaattcccagcctggccagattgtaaagaataaaaaggtgtgttcaggagggaacaccagggtgtgatcaagtgatatttgataagattagtgtggatagaaggaagccagatgcaattcagcaagacaatggaagaatgaccctgaaggcatttcagagagctttgagggtgctcctcccatcacaggcccagaatgccagggccttgagagcagaatgggttcaaaggatgggggccaaggtccctgtgggactttgaggcttactacccagggccaactcaatttctgctccacccattccagtgcagtgctctttggctgctccagcatggctcaaacaggtacaggtttaatgcaggacactgctccagaaagcacaggcagtaaatcttggcagcacccacctggtgctaactgctggtgcacagagtgcccaagctgtggaggcatagctacctccacctaggtttcaaaggatgccttggagagcctcatagcccaagcagagaactgccacagtggtggggccacctcacagagcctctactagggtaatgcctgatagagctatggagtattccacccatgagagctgctgtgagggctgtgcccaactaagccatggacgggtcttccctgggttttgggtcccaacccccactcagtatgtcaagaaggcaggacatggagtcaaagaagattattatcacgcctcagaggtgaatgtcgtttgccttgtcgggtttaaatttacttgtgaattattacccctttcttctttcctatttctcccttttgtgatggaaatacctgccctgtgcttgttccacccttgtattttgtaagcatttaacttgctggatgtcacagattcacagctggacaacaatttgcttcagaatgaattgtaccttgagtctcatccatatccgagttagatcatatttacaggagactctggacattatttttattttttccttaaatagtgtttgaggtacaggtggttttttgttacatggataagctcttttgtggtgatttctgagattttggtgcacctgttacctgagcagtgtacactgtactcaatatgtagcctttgatctctcaccccctcccaccctttccccacaagcccccaaagtccattgtatcactcttgtgcctttgcctcctcatagcttagctcccatttataagtgagaacatacaatatttggtttgccatttctgagttactttacctagaaaaatggcctccaactccattcaaattgctgcaaaagacatttttcattccattttagggctgagtagtatttcatggtgtgtgtgtatgtgtgtgtgtgtgtgtatctatgtatctctctctctctctcacacacacacattttctttatccacttgtttgatgggcacttacggttccacatctttgcaactgcaaattgtgctgctataaacatgcgtgtgcatgtgtctttttcatagagaattcatgactaagacccccaaatcaaatgcaacaaaaataaaaataaataaatgggatctcattaaactaaaaagcttctacacagcaaaagaaattatcagcaaagtaaacagaaaacccacagagtgggagaaaatatttggaaactatacatccaataaaggactaatatccagaatctacaagaaactcaaacaaatcagcaagaaaaaaacaaataatcccatcaaaaagcaggccaaggacatgaatagacaattctcaaaagaaaatatacaaacaaatggccaacacacatatggaaacatattcaacatcactaattatcagggaaatgcagactaaaaccacaatgagataccaccttactcttgcaagaatggccataattaagaagtcaaaaaacaatagatgttggttggtgaggattggtgaaaagggaatacttttacacagctggtgggaatgtaaactagcataaccactgtggaaaacaatacgaagattccttagagaacttaaggtagaactaccattcaatccagcaatcccaccactgggtatctacccagaggaaaggagtcattttgtgataaaagagactctgaactttagaattttgagttgtcgctggaacaagttacaatctttgaggctactgggatacaaagaaacaatgcatttcgcatgtgagaaaaacatgaattttcacggggccaggggtggaatattattgtttgaatatatatgttcctccaaaatttatatgtcagaacctaatacccagtgtgttggtattaagaggtgggaccttttgagaagtgattaagtcatgagtggtccaccctcaggaatagggttactactctcataaaagaggttgaaaggagtgccctaggccctttttcccttctatgtcttctaccatgggatgacacataatttttcccctccggaggatgcagcaacaaggtaccttcttaaaaatagatagagagcagcgttcaccagacacttgatctgccagtgctttgatcttcaacttcccagcctctagaactgtatagtctgttcctgctgctataacaaaatactttagactgagtaatttataaacaatagaaataaattatggtttacccagtctaaagtattttgttatagcatcaggaacagactgaaaaatggatactatgtcctgtatgactggcgcatagaatgtgaaacagagagtgacagggcatcagagtggaatatgggaaaaggccaaatcctgaaggtccttgtatgtaatgcaaatgaaataaaattttatttaaataaaaggatagggagccattgaagaatgtaagtagagttggtatcaatagcgttgctatttatgatgatcatgttatggagtgaatgagtgtgtgtgtcccctaacagtcataggttgaaattctaacccccaatgtgctggggttatgaagtgggacctttgggaggtcattaggtcatgagggtgtagccctcatgaatgggattagtgcagttataaaaagacacaagaaagcttgctttctctctctgctcttcaccacatgaggctacaaggagaagcaaacaatctgaaccaggaagcaggttcttaccagacataggatctgctggaaacttgatcttggatttctcagcctccagaactatgatcaataaatttgttgtttaagccacccactccatagtattcttttatagcagtccaaacttacaaaaatatatcactttgatggagtgtagtgaatggactgataatggtgagactagaaataaggaagctaatggagatattgcaatagtcaaagccttaaaattgagtgggaggagtcggaatggaaagcaaataataaattccagagtatgggtagcatagaatagtggctaagaatatggcttctgggctggctacttaagcttgaaccccagcactgctacctcctagctatgtgttctttgggaacaccattagcttctgtgtttgagtttcctcatctataaaattcataataatggtatctacctcatagtgttgttgtgtatattaacatgacatttgaacatgttgctgaatattaccgtacagttatgcactttatgtgatgtgcctaagtgtctagcacaaagacagcattatgccagaggcatttgtgtctgtgtgtgtgtatgtgtgtatacaatctatatatactttttgctcatcacaatgggcaaaattatttttgttataaaattgtattctaaagtaaatttaatttacttaaaattatattcaggacaagtaggcacaaaaattagcctggtttagaatgacaaatatgtataaaaattaaaaatgtgattctttaggccaggcgtggtagctcatgcctgtaatcccagcactttgggaggctgaggcgggcagattatgaggtcgagaaatcaagaccatcctggccaacatggtgaaaccccatctctactaaaaatacaaaaattagccgggcgtggtggcatgtgcctgtagtctcagctatttaggaggctgaggcaggaaaatcgcttgaaccctggaggcagaggttgcagtgagccgagattgcacttctgcactccagactagcaacagagcgagactccatctcaaaaaaaatgtgattcttcgacatttatgtttttgaggtccttttaaagtcctatagttgcatggtataatgactttggagatagaatgtttcagaataggtaacattaaaggattgtcccatgtaactggattctcataattgcttttttctttttattactacttaatacatatcctagataacccagataacttggttttgaagaactactaaaacacaattaagtattatcttttaccctaaatgtggttagactctctgtttaaaattattgatttttggatcccatatgctctggaaattttagtgtgttttaaagcaaaatataagagaatgtgaaccgagggatattttactctttacagcatgttgaacccaaactctcactagtatctcatcgtatttcccaaaggtttgccaggataaacttcagaagcagacagggtgccttggctcaaggatttgagaaatttggtcttactgagagaaaatagagtgagtaaataattattttcaataaaggattgacctggtcaattttacgttttttttttttttttttttttttgtaagatctgatgttgggatgaggaatagattgatcagaagatagttgtatggagacaattagaacattcctaactacttcataagagagatgatgtaggcatgagttatggcatgtaggactggacttaagaggaagagaaagaactgagaaagtggtagaaaaaaatctcatagaacttgatggctgattgaatttgaatgactagggaaaagaaggagtcaagaatgatcccacatttctaggctgtgtaaccaggtagaggatcatgagccccaactgacagagaatgtggaagaaaatgtagctttggggtatggagaacagaacgtttagttttggacatactgaatttcaaaggtctatgccagagctaggcaggcatgaccagcagataatgggacacacagctccagtgagaggtgtgggctggagatactaatttgagatttattaccagaggtgggagatgagtcatgaacatgggtgtgctcttcttaggagaatgcaaattgcagagaataattggtcaagaacagaaccctaaggaacagaagtgcgtaaagaatttgtgtagaaatgaaacccttgaagatgaaagaattctggattagacatgtaggaagaacaccacggaaaccaagggagttgacaatagttttggggtagaagggatctattttatgttgtgaaatgtccaattagataaatactaaaaagtttccattacgtttttaaaatagcagactttttttttttttgaaaaccctcttattcagaacaggttcagtggaatgttaggggtagaagccatattgaagacagctgagaaactaatcctaggtaaagatgtggaaattgcaagacctcactttcaaaaagttttgaggagaagaggagaatggcaatactactgtagagcatactttgggaaactctgggaccacctgggtcatactttgggaccaggagaggcatgtgcctatttattggctgagaggaaggagcttatagaaagtgagcagtttaagataccatagagactccggccattgtggctcacgtctgtagtcccagcactttgggaggcaaaggtgcaaggattgcttgagcctaggagtttgagactagcctgggcagcatagtgagacccccatctctaaaattttttttttttttccaaaatttagccagacatggtggcacacacctgtagtcctagctactcgggaggttgaggtgggaggatgcttgtgtccaggaggtcaagtctgcagtgcgacatgatcatgccactgtactgcactccagcctggacaacagagtgagaccttgtctcaaaacaaacaaacaaacaaacaaacaaacaaaaatacaaaagagagagtgatggctaaaggaaaatgtatgggaatgaagaacattctagtactcaggtgccttaactttgacccagaagaaatttttttgtaatgagagcctggaagaaaagagcaaaagaagtaatggatactatcattgatagaactttcagcagagacgcagaaatttgtggcttataacattagatggcatcaatattccccctgagataggaaacaaggtcttctaaaagtgagaaggacagattatttaatacaggggctaaagagaagccccttcctcttgaataaagcctgtgatagatgatcttcaaagaggaccaccatcaacttcttcttcccctggaagcacacactgccacatcccacatcaagaggtgggatttgtttccccttctcttgaagctgggaagacgtgttattgcctttgatcaacagaatacagcagaaataatgttatgccagttccaggcctagctttctaagcatagtggagttccccttcttctctcttagaagccagctaccatgaataagaaattcaactactctgagatcaccaggctgtgagaaaagctaagctagctgaattaatttgctaggactgccatgacaaaataccacggactgggtggctgaaacaccaggaatttattttctcacagctctaagagcaaggcatggacgggattgcttttcactgaggtctctccccttgacttgcagatgactagcctcttgttgcctcttcacatgggaatgcacgtctctctgggaatgcacatccctggtgtctctttctcttcttatgaagacgcaagtcataccagattagatctcatcctaaaggccttatttaacttaaatgtctctttgaaaccatttttccaaacatggttacagtctgaggtactggatgttgggacttcaacatatgaattttgaggatgcagaattcagcatccaacactaaccatgtacagagatcatgagagagagggacaggacagatgggcaatgtggagattcattggtcagtattctgagcttatattttctcacataatcatccttcacataagtctctttaagcacatagagcaaagctgtatcaatttcatgctgcagttacacctttctatttagaattcacaaaacaaaattacccatccccctcaaaaaaaaaaaaaaacaaagaaaataacacatatacatcttctgatggaactaaatctgatatgtaaaatgactcaagaaaaatccccagctagtgagactgtgctactctctattagggtaataaaataacctgctaatatcactggcttctgatacaattgtgatgtgtaatatataggctgggagaccactgtggatatctatttttctctcatttttccttatataatttgggaagtggaaggaattggaaactacaatttcctcatgccttcataatagattctgtacatcctttggaaagtccacaaatctaaaactttaaaaagctacagggatcaggcgcggtggctcaagcctgtaatcccagcactttgggaggccgaggcgggtggatcccaaggtcaggagatcgagactatcctggccaacatggtgaaaccctgtctctactaaaaatacaaagattagctgggtgtggcagtgtgtgcctgtaatcccagctgctcaggagtctgaggcaggagaatcacgtgaaccagggagttggaggttgcagtgacccgagatcgtgccactgcactccagcctggcgacagagcaagactccgtctaaaacaaagaaacaaacaaaagctacgggaagtaaaatgttgtcagtttaattctatgagaaggtccatattgtgataagggaataatattaagtcatgtacagaaggctgatactcagatacaatagtgaccatctacattgcagggtggatttgaagctgtccatttcatcccatcctctgcaatggaatgggaactccaacaccttctccaaagctgagtcgctcactcattctctgttattctcttggttttctaagcagactgtgttccagtttccatttcattctgtattttcttatgcacattgtttgttgaatttttatatccacacagaaatgcacatccctacctccatacctacacacataaaagatttttgatgtatggatgctggatgcaaggactaaagaatcaaaagcccttggaataagagagtactgagagataggacaaacacattttttcaatgttcagacttgctggaaaggagaaaataccctaaagaaagtgtcagaaacccccctttaggcctcttttgttactctctctagcttttcaattggggacgtcagttttgctggtgatggcataggcagggcaaggcaaaattaatataaaattagagaagatacgctataaaccggcagaggtccatctttaaaccattgtgaacaggcaggggttcatctttaaaccattgtgaagtgtgtcttctctaagtttaagacgaaggtccagtcttctccagtggggccagaagcacaagtccttttattttttattttatttttttttttgagacggagtctcactctgtcgcccaggctggagtgcagtggtatgatctcagctcactgaaatctctgccacccgggttcatgccattctcttgcctcagtctcctgagtagctgggactataggcgcctgccaccatgcctggctaattttttgtatttttagtagagacagggtttcaccatgttagccaggatggtctcaatcttctgaccttgtgatctgcccgcctcagcctcccaaagtgttgggattacaggcgtgagccaccgcgcctggcccagaagcacacattgtaagagattctgccttctttgctttcaggccacaaaaataagaggtggggcctggtccttgtaggatttttttctataatatacttttagtttagctagtattatatttctgtgtacaatccatttctgttattaccatggttactactattgtttattatccttgataatcactagcttgaaccactgcgataagtttgaagctgatttaatagcctctactctcattcctctcactctgctctgtcagagtgatatttcttaaacatcaatgtgaccatatctgtggcttgtcctttcggtgatctcatccagtctcacggagataagtatgatatagatgttggtgtcatcagtatttatttcccagcctggacctctcctctgaactctagatttatatatatgcaactacttactccatagctctcttcggatgtctaagagacatcctaactctccaagcaagatgaggctcctgatcttcctctctaaatgtcatcctccctccctcagttctcctttcccatttcagaatgtcaatccattcttctgaatgctttagtcaaaaaggtcagagtcatctctgaataggaactgagatacataggctaaatgacatcatggcatcctcattacatgagtcagtaagtagcagcatcaggatatttactcggacagtgtaactccagagtctttgttctttacccctatgtttgactgcttctctaccttataaatccctttacaggtaatccaaaaacttcatatagaatctaaatgacaaatgccaactgctaacctcaaggcaagcttgctacatcaaagaactatgaattctggtctacctagctgtctgggaaaagagctgaaaattcccttggttgagggccaagatcttttgattcatttttctctctctttcttataccttctgcatgttcttatgggaatcctagattctgcatgttcttatgggaatcctaggctgtgattttgagatgggaattcagaagtttctgttataattctgtctcagctactaattagctatatggccttgggaagtttctaaactttttggtattttataattactctgccaaaaaatgacatgcatacactagatggcccagagtctatagcaataatacagaaaaaatgtatagagaaatagataaatcaaattacagggcctgtttgcttcttgagggaaagaatcacaagtttgtttactatccatctcccaagtgcttattgaagttacatcttcggcagaaactcagtaggtatgtgtgaattgctggttgaagattcatgatttgctatatggtacggacaagatgccttagaattccagaggcagtttggaatagtagaaacaaatctgaattgagaggcagacaacaggatctaatagcagagaaggcagagatgtgtaagttagttgacttcaggacaaacatctatcatatagtcaagacttttagtatttgcctctgtaaaatataaagagagtgggattggttgatctcaaagatatcttaagggagctgtgactgtataatttactttttccataaaacctaaaaagtgtaagcatgaaacatttttgtgtgtgtatctattccattggaagggctcagcaattgagcatcaggatctagcacatataatcatctgtttacatttcatttattttagaccccacaccaatactgtgaagtggataataatatctccatttatgcataaggaaattgaggtccagggaggcttttcaaggtaaaactcagtgtcagagctgggattgcaatccaggattaagtggctctcagtttcaattctctttgcattgaaccacacatcctccccaagtctctggcactagtgatgcacatcaggaggcaatgtaggggctcttcaggatataaagagggctcatgggtacaaacatacagtgaaaaggacatggccacacttcttgaaaaccaggttcatccaactctaacagaaagtgctatgattagccaaaaaatatattctagtcacacacacacaaaactaattaattagaaaaatctggtgattaactgcatgccttcattgttttcaataaatgtaacctgtccaataaatcagtaacatttattaatgataatacaaagtatattcagtaataggcttgccttccatgaggagactaatatggggttttatatggagtcccaaaagaaaccaaataaacattgttagcatttgcttcattgcacagattacatggtgccttgattctgctgctgacaagcagtaaattgctctgttgtgtgtggtgcttaaaacaggtttaatctgctattattaatagttccatgaagaatatgattgcctatccccatcccactttcaaccactgtggccaacatacgggaactcaggcaactaaaataattacagaccacaagctgtaacaataaaccacaaaaggactaatcatatcctttcttggaatttacttatttcaaatagtttgttactttttttttcatgaagagctccatattggaccacaattgtgatgagaagatctaacttggatttcagctgcagaaattatgctatttactttcttattacaggcactaaattgctgtttggattattattatttttttcctttctctagatagttcaacaaatagattttacggtctctttatgggacaaagcagagtatgatttcgaaaagtataaagactaaataactagataattgcctagagttgaagtggtgtattcaggaacttcactgggaggaactaaaaataatttaaaaataggagaaagtgtcattggcccatttatgcaaagccaatgcaaagaaaagctgaacacttgacttctgagaaattaaagacaaactgtggtgccaagttacagcaattcccttggcctaatttttggtaaatttaattttatcctttctcaatgttgtggaatctataatgtatattttattggtcatattatatgcatgtctcatgcaggtttccttcagaacttcttgaagatcaatagggaatatattaaaaatgaaaatagaaattaggttgaatattggcctacctacaatggttgaaaaatcactttagaaaaaagtggttttgcttatttccttgttgacctatttgaatgctttttatttaaaaaaaaaaaaaaaggtcctcagcatgaaggatttggtaggtgatgttttatctcactgtaaacatttctttttgctaatcaaggatctttgaatgacagaagggattttaaggaagacaacaagttagtcttctggagtaacattatctgctctagtgaactggtcctttggagttcggtggttttaaaggcatgctttcttttattatttggagattatattgtttaaagttttctgcatggtgaatagaggttgctaggggaacataaaactctacacagagacagaactatgactaggtccaggctctgtcaccaaatagcttgtgatgctgagtcagtctcacaaatgtgcagcctgttgtttcctcttccacaaaatgataatatttctcttcatgtggctttggcagtgatatgacctattacatgtgaaggcattttatgataacgtgcggtgcacattagacatcaaactttgttaacatattaataatatacctcatttggtgacattgttctttttcctttataatttttcaatgataattattaaaatctttgtcatcaacttagtgaaaccccgtctctactaaaaatacaaaaatcagctgggtgtggtggcacatgcctgtagtcccagctactcaggaggctgaggcaggagaatcacttaaacccgggaggcggagattgcagtgcgccgacattgtgccactgcactccagcctgggcaacagagtgagaccccatctcaataataataataataataatactttaaaaaaatctttacgggtcatatgtgccccctcccagttcaccaactttgccttctcactggatggttctcataacttaactctatttccacctacttttctaacacggtatttcataccatacaaattggtcctttacgcaaaataatttatatgttaatgacttggtcagatgggctcaatattaactttttcctcgaaggtgctagtttgttatcccacacacagtgcagttaatacactcataaatgtccttcaaaaatgtttctaagggccctgcagactgaattttagactccgtgctcatttttacttcagtaatttcattagtagtgtttattttataaatagtttgtaaagtgtttgaaggcagaaacatttttaaaatgtttatatatttttgttccaaagtattttgcagagaaacaaatccacagaagcacccctaaactgggagtgtggtgaagtggggaagagcccagcccagggctgcagatctcgggatccaagaatacatagcaggtagctcaagagggaatttagagtctaggcctgcatagaattcacctgaaaaggtggaacagagaccaggactgaaaccaggaccaaaacaaggaccaaacaaaccagatattccagagaagagtaagtggtttctattggtaagagttgggattagcagaaatttcctgaaacccagatgtagtcacagaagccctagagatcccatggccctgcctaagtgaaattagggagagggctcagtggggtgtcttgaatacatttacttgttcaggtgtcgaataatgcctattgagaagcaactatgtgccaggaaaagtacagggtactgggtatatgtgggtaagccagacagcagcaactctgccctcatttacctcccatctcagaaaacaataaacaaattcattaattattagagataatgataaatgctaagtaaggaacaaactggacacagcaggggtttcacctacatggagctgtgattaggggagatgatgtttaagatgacattggaagcatgagaaggaaccaaaaggtcctcagaccaggagaggccaaaagctcttctccatgagtgatttaaagtaaatgtacataaagagtagccagtggaggagatggttgttagcaccgtgatggaaaggtattgggaaatgctggaaaagcatggcataagggcaagaagggaaggtcacccaaaggcaaggttcttgtgggcttcccaaacctcctctgcttctctgcaggtgccagaatttggttatttctctgggaagaacttgtgtcatgaaattgaaagaagcccaagagagttgcgccatagagaatgaggagtgtttgtcagatatatagttgtcatttactgaatattgtggttctcatcttagtttactcccaagaaaatacctggaggctttcaggtgcttctctcttacgaggcctggtactaatgttttcattcaattctttgagcttccctagattcttttaggaacttcttttttttctcctgttagatcaagattctgttgcttaccatcaaagagcccaagctaatacagtcacctctctgtccttatcttgcttgtctgcttagcattcaatgcctgttttttgaaggactattgtctttgggtttatgtgataccacatcctcctggttttctttccatctctctggttgcttcttttcagtgtcctttgctatctcttccagctttactgatcctctaaatgctagagtccctcctgaccaggactaaatccttttgtctcttttaagtcattcttagtggtcaaaaaggtatgcacttaggtgctagggtaccttggttcaattcccagccttgccacttcctagctgtgacctcggagaggtcacttaacaattccttgcccatttcttttattattattattattttaaaaaaacctatttcgtagggctgctaagagaataaagagggttaatcatacctaaagtattttgggcagagctggttcattatatgcattcaatgcatgttatttttcttacaattgttagtaatcatcaattcccatggccttaaatgttacatatatgctggtgacccttaaatatgtattttcagccccaaacacccctcttagctctataaaattatgtatccaaccactagaatttatcaaactttagaagactaaattcaaattttgattactaattcttaacaccccccaatctcactcaacaatttccccccagttttctgcatcttagtaaatggtaagaatacctgcctagttgtttaagtcagaaaacttggaatcatctatattgttgctctttccctcctagccacattcaacctatttgtcaaattctgtcatttttatttataaaatatagattaaatactttcacttctttgtatctcaacaattaaaatttctaatccaatgtaccatcataacttggctagtttactgcaatatcttctttacccattctttatttttcctccatgaccaaatccattatttgccaaatagagttttgttttacaaacataaatttgtgtcattctcctacttaatcctttaatgattttgccctgtgcaatgagtcaaatccagtctgcaagactctgcttgacttgctgtatgtctacctggctggtctcatcttatatcaccttctccctcaatcatggtgatttggtcacatcaacctccatcagtttcttaaatccaataaaccctttcctgccttagggcttttgcgcttgctgtgtcttcaaccaggaataactttttccttgcttctttcattactggttttctcctgaggtctgccattaaaaaaccctcaacttcagaaaggcctgctacatcactcagatttctccagagaagagagatgattggatctatgtctatctatcatctatccatctgtggatttattttaaagaattggctaatgtgattatggggaatggcaagtccaaaatctgtagggcaggtgagcaggctggaaactcaggcaggatttcaacattatagtcaaggcagaatttctgcttctctgggaaacctcagtttttgctcttaaggccttcaactgattgagtgagccccactcacattatcaagggtaatctgatctacttaaagtcaactgattatagatgttaatcacatctacaaaatatcttcacagtaaaatatagattagtatttgaccaaacaactgggcaccctagtatagcttagttgacatataaaacttatcatcatactttccttaggtctcctgcatccacaggagtctctttcatagagttctctctttttttttttccattggatgtaccataatttacccttaagtaattctttgcttacttattaatttccccttcctccaccacactctaatgtctatcaggtgagaacgattcttttttgcatcaatatatatccaatactagcaaagtccttgggatatattaagcattcagtaagtagttggtgctcgatgcttaatatgtgtttgtgaaaacaattaacaaccacagggaacttgagatgaaaagttttgacccaatcttctaaaatttttatgggagttagaatatcagatgttaagcataatttactaaaatgtgaatagacaagaaaataactgattatttctcattttcttttgacacattctcctcccttgtattttcctgaaattaaattagtcaacacagatttaagaggacttagagtctcacacactcagcccaaatatagcattgaaaagacttccaaagctttggcaacatattttattttaataaagattcaaatgcctgcaggatcactggaataattgccagttacacttctattaatgaacacatttaaatggggattgtgaaaagcagaaaatgatctgattttatggagtacgtttactgccagcaatgtacagtgatgaatggtgccctagaatttaattttagttttagccacaaaacagccaaaattgcacagcagcctctttaacgaatatgtactgaacttgaaaaattatttattgagttctcagtgatatatatatatataaattatttattgagttgtcagtgctatatatatatatatatatatatatttttttttccttggagatggagtctcgctctgtcacccaggctggagtacagcagtgcaatcttgctcactgcaacctctgcctcccaggttcaagcaattctcatgcctcagcctcccgagtagctgggactacaggcatacatcactatgcccagcaaatttttttttttttgtatttttagtagagatggggttttgccatggtggccaggttggtcttgaacatgtgacctcaggtgatccacccatctcagcttctcaaagtgctggtaatacaggcatgagacaccacgcccggcctcagtgatatatttttgtgaaccaattagttacttcaaaaaataaagaagagtaatgctgttaaagttgatccacatagcagtcttattaccacccttgcatgggctctgtgctgtgaagactaggttctatgtgcaacaagttctattaacaagcctctttggatgaagctgcttttgaacttgatatgcattcagttctgatgtacagtgctaaaggaagtagaaaatctcaaagggttcataagacagagtcttagtactatttctaaatgctggttcttcaagtggtatttgagtttgaagtacatcagttcacactgctcccagactaaaacaaaaaaatgtcttagaaggattagctgaatctaaggaaactttttaggaatattaaccagaaaaattcaggagaagcaagttttgttgactttatcagaatgctgtttgttcccctaaatccaacttctccttttgcatttatatactgatatttagccagaaactacatttcccatcttcccctgtagctagatgatccctgtgactaagtttgagcccttaatgtgaataaaagtgatgtagagactcttcatgttatctttaaatccagactcacttgcccctggactatgactacctcactttccctcaggatctgaacatgacactgacccagtttataggatatagatggtagcaagggatagcaggacaatgtgttggaaggaacctgggtcgctgaatgacatcctgctagagcagagctgccacatcagcctggaccaaaccaactatgacttgaaagaaaatgggagctttcttataggattgttgcagatgaatcaatacagaaaatcttgaagtctttagaaagacttgtaatgaatttttatattatttagaggttacttttacataagttgtttttaaaaactacctacattttaatgttatgtctttaagacatcaaaaattatgctatctcttttgatttttgcaaaatcccagtgagggaatcattatgagaaagattatgttagcttctggaggaactcaagggacagaataaaagtaaccacaataaaggcactattttcagatttgtcctctgacaactctttgtagggctaagaacaaatctgtgttttctaactttttttagggaggtgactctcaaatctgtatgtgtgaatatatgtataatattaccattgcgataaaacttataaagtgatgtctaacaagtaagtcattagacatccagtgcttagcatgtacccaaattcaactatattccaatttgaataaagcatatatacatctatagagatatagatctatagatatagatatacatagttttcaaaaagcaaatatctacctatagacatctatctctatatatctatacacatagatataagaatatattagattcccctattttagattattcttcaaaaagcaagtagatatctatattgtataccatgtatatatctatattatatatatatatatagataggttatttttcaaaagcaaatttatatatatatatgtacataatgtgaatcaaagtttgagagggggaaaaagaaactttaagaaagaacttctagattatacaacacaattcagagtactggcatgataataatggtgctaatagtgataatgataatagcaataacaataatagcagctacattttgagtgttgtcatgagacagggtctgtgctttttgctttacattcattgtctttgcaaagcatctatgagatgttattcttcaattttgcaggtgacatatgaaacccagggagtatcttgcccaagggtaaccagaaccagaatctaattacattataaattttacctcaacatatatccatttttgcacagaaaagagttagcataacaggtgtgagatcactgtccttagaaaggcctgcttgcaaggctagccacttggatgttgggaaagtgtctaccattctttgaagcaaatggctcactgtgcttaaactgtgcaaacaatatggtttatgttgaacatctgctttgcttcttggagtctggaatttgggtacatactaagtactgaacgtctaatggcttccttgctagacaacattttataaatgctatcacaatgactcattgctgggagaattaagcacttcctgtgagacttcactcagaaagaactcttggaagcttgcctcaggtttcctccaaacattaccccatgtgccttttccctttgcagattttgctttgcattcttttgttgtaataaatcataaatgtgtgattgtatattgggtcttgtacatcccctagcaaatcttcaaaactagagacagtcttgggaacccctaacatatctatcttccatgtcattctctcatttggagaaaataaaattttattttctacctgagtacataggaagacgtatttctcagcctctcttgaaatcaagttggaccatatgactgagctctgatgggtggaatgtctgttagtccaaaataggcccatcaaatgccccacaccatccttctgctctcaactgaggaccagatgcagatgacccagtggaggaagctggcaccataggcaatagtggaaccacgagatggaaggagtgtcctcaataaatgagttgaacagaagtcccatcctgtccccaacggagtcacataggattaggaaatgaaagagaaacaaacatttttttgtcttaaaccactgagttactggagctgtgtgttacagcattgatccttctctgtctaatacatatggtgacgtgctggataccaacacccccatctccttccgctcaactttgaaatatgttgcaagagtgaaagggatttttaagccatagagatcccattactcatttgatagaataatatttgatgggcaaacacaggacacgaataatctaccagatggcgactcttgcaagggaatcaaaggaagttcttcattaccatttgagattgctcttaacatttttgagtagtacttgataaaacaaatagaaggtgttaaactactgggtgtagttcttttactaaaggagccatgctctttcactccccctattattagattatttttcaaaaaagcaaattaacagcacttcaattttactcagtagatgtggaaagaactaaaaagaagaaagtgagagaagataaaaattttattgggctggcctccaatctttttgtttggggtcattcatttgttcacatatatttattgattacctgtcatatactagacacagcctgaagggctgagaattttgtagtaaagaaggtgcagcacctgctgtcaggaagcttaaagaataggggaggagtccacaagcaaagaggaaacccaaaataagcactatgatgggagcacatagcagagtctccaaacctactttaggagatatcagagaaagcttttccacagacaagtctttcaaccccaaaactctcaagatagctgtgagtcctcctcagtttccctccccttttaatccaaaacatcacgacgtccactcagctcaacctccaccacatatccaagcccatcatttctctccttctctacttgctactaccctggtctatgccacatctcctttccgtcttaatctcttggaccagatttctagagggtccccaattttactctgatgtcttacactccattttgcttagagtagccctccagggccatcttaaaaaaaaaaaatcaatgctttgtttgtatctgaacttttaaaaactggtagttccccactatccttagaataaaatacaaatgacgttccaggttccagccactcttgctcactcttgcctcatgattttgggttgttctttatgcctagaaagtccttttttctaccttcccatggccgtgcccttcttgacattgcagatacaatgcaatgccacttccctttctctagccgccccatcgaaagaagctccctgctctagttctttgtaacaaatgtcatcctccttctactgccactagatattttcttatttaactatgtgtttgctttttgcccctcttttcactatcttcccccaatggaatacaaactctaaagaaaaattacctgtctttttttgtcagtgtatcctaaataccttttacagtgatgagcctgaactcagcactcagagaataagccatgaaaaaatatattgaaaggaagtctaagtatggatgtggagaaggtgtagctgttgtcctgatgaagaagggaattgtgggaagcagcatttctcgcaggagaaaaagtccaggtcaaggcccttcagaggggtgcacttcagctgcaggcagttccttctggctggagcagagtaaatagggatgagtgaggggtgagacgcgaaaagtcagcagaagatggttggtcaaggcctggctgatcgtgaactagttgggtcactgcagtatagacagcatctaacccaatatctgacttatagtagatgttcaagaaatatttgttggatgagcatgtaaggcaattgagtctctcttctaatggcaaaaaaaaaaaaaaaaaaaaaaaaaaaaagccagcaattggttttaagtaggaactgactggtttctatttgttctttagaaagaccttttcagctgcacagtggagaatggttcagaggaagacaggactgtaggcaaggagtctgggtcattgcagacatgcagatgagaggtgacagtgacagcagcgtgtgagaggcagggcagtggagagggaaaggcagaggcagatttgagagatacaaagactggagaattggctgagcttggagattaattagaaacaagaggttctgagggaagagcccagaaagacaactggatttacattttttttttttttttgagacacgatcttactgtcacccaggctggagtgcagaggcacaatcttggctcactgcaacctccacctcccaggctcaagggattcttgtgcctcagcctcccaagtagctgggatttcaggtggacaccaccatgcctggctaatttttgtatttttagtagatatggggtttcgccatgttggccaagctggtcttgaactccaggcctaaagtgatccagccgcctaggcttcccaaagtgctaggatttcaggaatgagccaccatgcccagcctggatttctaagtgactgcataaatgaaggtaacatttttgtcaaaataatctctccacacagatgtatgcacataaaatatacctatgagaataaaggagaaaactaacagtagttacctctagcaaggtgggatgagaagtttcctgtacctaggacacttcgatatttcaatttctaaacctctgtatgatttcaaatgtttagcatgacattttatgagtttaaaatttgaaagaaggccgggcatagtggctcatgcttgtaatcccagcactttgggaggtggaggcaggcggatcacctgaggtcaggatttctagaccagcctggccaacatggtgaaaccccgtctctaccaaaagtagaaaaattagctgggtgtggtagtgcacgcctgtaatcccagctactcaggaggctgaggcagaagagtcccttgaacccaggaggtggagttttcagtgagtggagatcgcgccactgcattccagcctgggtgacagagcgagactccgtctcaagaaaacaaaacaaaacaaaacaaaaaattgaaagaaacaaataaatcaagaagcatctaaatgccacagaatatattagattgatgcaaaagtaattgtgatttttgccattgaaagtaatggcataaaaacacaatttcgttcacaccaacataatgcataacataaactaatgcttaacatatttcaagatgacattactgagtcattatgaatttttaattacattatgaagtttagttacttttgtacatagaagaataaggaaagaactgaagggctctgatatcttttgacagcactcttaaagatattaagtaaaacatttctcatttattttcttatctacatggatattaatatcctaaatttttaaaggatagtttcatgtccagagaatctaagccattgttcaagctcagaaatggcagcggtaaggtttgaaccctggacagcgcttgcactatgtcagtctatggaagtcaaaagggaggtcgtgttaactgcataggcttataggcaatcttcccttcagaaagcccttctggttggaaatctgacagacagttctgctagggcaaaggaaatagcattttaactctgttcttaccttaattctaaagtacatgaataacactttgctcttaaggaaggccttttatctgagtctttcaaacactgaacaaaaccaattattacccaccctccttcatggttcaaagagaagattttaatccctaatttgctgacagagagacagaagccggcaggaatgaagtgatttactgagggtaacacagtctatgaaagcgttcaagaataaccctgagggcttgtgacaaaagagcaattgccttatgcaattagcagtgaattcctctgtcctaatcactgcatcttactgtttcccatgcaaagtttaagggaactaaacttctcctctttcctttcccaccataaatcggacgtagtgctttttatgtaaatgtactttgcaaaaatgtagatccctataattttaccttccatctgtttcatctgtttttaaagatcttactgcagaatttcccaaacactttgaatggggtggaaaagccccatacaagaactcagatgtcctgctggttcctttggctacaacatcaaaactcttgcagaaatgaaacaaaaaaaaagtatgcttctgttcttcatgaaattgcccaaggagggtgtctggataataagccaaacatggagggtggggattaactgcatttgagatgtgactgcagagcacattaagctgctttgctctacaggtgttgctgcttcctcacaagctccactgtgatggatacaacctatgtgacccccagtgagtcacacctttttaaatctcctcatcttgagtgctgagatgtgcagtgtaaggtcccctgagcaggctgcaccatggtcaagccatcatgacccctgtgacccacatgtacacatccagaagtctcaaattctgggagccagaaagtctgggacaacaggaaaaccactaaagaagaaaaatggctagtacctgtcttagctgattaggtaaccctgcgacattctaccattctagcatgctctaccctaactgatcaatcaacctagtgacactgtgctctatgacccctcccaccttgtgataatgcaccttgcaaccttcttcccctgcccacaataaatggcccctaactgtaactttccactgcttaccctaatctatgaaattagctccaatcccaccaccctctgctgactccctttttggactcagcccgctcacatccaggtgaatagacagtcttgttgctcacacttagcctgttcaggttgtctcttcaattagatgcgcacataacacagaggtgatgggatgagatgccacacccatgactgtactacccattagaggactagagagaccctccgttgttggctttgaagaatccagctgccatattacaagggagcttgcaagaggaccaggtggaaacggactgcaagtagcctctaggggctgcgtggccctacattgacagccagcaagaggggaatttcatatgtgcaaccacaaagaattgaattctgccaacaaccacaggagcttagaaaaggatccacgatccagaaagaaatgcagcccaatcatgattctaactgtggcctcatgaaactccaaccagagcacttagctatgtcatttctgaactcctgatccttgggacagtatattatgaatgaatgttttctaaatccatttagtatttggcaaattgttacacggcaacagaaaatgaatgtaaacatctttctattttagataaaaaaagatagtaacataacatttaatgtcaaaaggacattagcaggtattaaagtgatgccttaatgatatatttgattttaatggataattttacctattataatccagagcaaagaaagaaaaggaagcaggggaagattccatagaagaaggaaccagctgtctgaagcatagaggtctaactatttgcaactcatcctgtgccttaaaaatgggaagactaggttatatattattaattaatgacagaaaaagccaaagcagcattggcatcactatattaaaacttagtgccccactatatcatttacaaccacctaaaattgaactgaagctataactggtttcgaaagagtgcagcaaagcaagattatgaaacatatatattgatatttgtgtgaccttttgaccattggttctcaaatgaggctttctgttcactgtctgttataatgtaaaatatttttaatagattaaggacttcagattaaaaaaaagaagaattcctaaacatcatcccagttaactgaataaaaatcctcaaaaataagacctcttacctctctccaacccctacacacacatacgcgcacacacaacacacacacaccaaagacttcatgcgattccaatgtagctagcctagtcattggtatttgtcatgatagagctcatcactaataggtcatttctttttgtgctagaagcaccttgtatatgttatatatctagttcaatggttctcaatcttgcctacacaatataattacttgaagagctttataaatcctaatgctgaagctttttcccagagcaattacatcagaatcaccaagcatagtagccactatttttaatttgtaaagctccccagatggttgcaacgtgcatttaattttgagactgctgatctgtagataatagtttgcattttctgcatccttcctaatatataattatgtagtccaaaacccaaacactgcctgggaagtatgtaggccaaccacgactgtcccactttgatggaacatacaactgaggttgaccatttggggccatactataataactcctttttattgaacttcatgtttattatatttatttctttaaaaaagtgcaatctagttatcattatcccagtttatagacaaagacacatcgtctcctgagtcagagggaactgcccaaatgagtaacatgacctgaggctgagtgacaccgaagcttatgataactgcacaaaaccagtgattctcaaagtgtgggctccagaccagcagcatcagcatcaccttggaacttgtaaaaaagaaaatgcaaattctatgacccaatcccacctctactaagtcataatctttcaagatggggcccaggaatctgtgtcttgacaagcccttcaggtgattctgaggctccttataggtggacagtgtactgtattctgtctctatcagctgctcacttttgagactcagaatctggcaagagacctaaaaatgtgtgggagcctcagtgagtaagcctgtgtgagggaggagatatttctctcactatcttcccttcctctcatttccaatctatattaacaatctatgttgaaaatgctaggggatgtatcagagataccatatgggaaaaaattggtggagttatgctggtcatatttacttgcaggggtgcctggctatgttgagctactttcacacaagtgtgaccattttaatatgttgacgaatggtttatcctttgaatcacagtatggagagttttaatagtttcattaaaaatgaatatcccaactgtttccagggaaatgagtttgtgatcttaagggctttgaggtaattggtgtttagggaaccaaggcagttggtttgctttcttggatggaagctgcttcagcttactaccatgctgtaaaacccaagtgctgctgacctgcttagtgtatttcggctatgcttagggttcatttattagaattgtacatttgactagggggaaataaaaattaaaaggccacttgtgtttgatttatgagagatgtcgattaatattttctgagcaaactgtgaagtcctttcttttaaagaagtatataaaataggcctttggcatattcaggtctgatggaaatttgtctcatggggcagggtgagatgggagaaagagaaatcaataaagatagagaagagaaaaaaatagaggaagaggaggatggggaagagctgaaaggagacaataattcacaaggggaagagacagaagaggtgaaaaaaaggaaagcaaggaggagtgaagaaataagaggtggggtcagaaggattaaaaaaggggaaagaaaagagtttgggaaaatgggggaaggagagaaaaggaagaagagaaggacatatgggcaacaaaaaaaaacataaaataaaaaaaaataaagcaatgaatgcagactttggagcctagcaatttattgtgaagtgccacttgtattagacatgctgcagagatgctggctccaaagattaatgatggcagtaatcatgattccaatttatagcaaatgcaatgaaaggcagccagaccccaaacagagaaaccctacggggatggcattggaataataacatagcagcagtcgaggaatacagggatgctgagagattggattcagttctcctgtgttcaacaaacattctgtatctgatgtacaatccaatgttaaaaagaaaaaaaaagtctgcttattactagatctctgaattatagcaaagaagtttaggtgttcacatgaacacatttgaagttttattctgtgattcacctcctctgagcactgacttttggcccagattggtcttttacacctcctttcctttctgtccttgctgctcagtgtttttctgctgccagtggtcaataccactgtttcattgcaaatacctgctgtctctgaagcctggaaccactgcagaataggcataactactcatcctctttcctggttgtcaaaacccttttccctttatgcatgtttatttgtatgtattgtcttgatatattacctatcagattcctttaatcagtggtctgtgtgtgtggtgagcactcatctccattataatctcctctgcccccacctattgccacgaagtcctaggtctttgcagatgatcaaattttggagaagaaacaaatttactctgcataatagagggagaaaaacttagaaagcccagggcaaggagaaggggctgaggagcagaaatgggagaaagacagactccattcattcagacagatggtggaaacttgtgtgcaatgcgcatgcagaaaccctataaaaatattctgcagtgtcaactaccggtatgaattctctgagtaaattgctgttgtggattccaaagaagaggtagagattcatatctagtctgcataaggttggacaaaggcagcagttgtggtggtcagatgtgaagaggatggcattagaagaaatccttggacatcacagacttctacacgcactggaactggggttcttaggggctgggtttcaaaaggatcaaagcaatttaatttggatctccaggggtgcctgtagctactttggtttccatatgtataagaacaaactatatgttgggatgtgtatgctatttgatacataaacatttgatgcctttaaggatgaactgttttcagatagattcatgacagcaagttttctctccctattcagaccataagctccttaaggatagaagtgtatcttctctggcttttgaataacctgcagcatctagtttaacccttagcacatacaaagtatttggtaagagactgtgtctcatagtcagcctggatccactcactttctctcaccccaccctctggggttttctgggctctcattcccttttgaagatggttcacccaggagggagggtcatctgcacacctggattgcagagaaccaggtacagtgatgacctacagacacctgtggtttacagacattggcagcatggttttttaaactataaaagttacagtaattatcctccaattccaggaatggaatcccttgataggcctcaatctacattcaagattcaagtcaagcaccagcctgtatttaaaaactaaggaaacaatggaagtttaatgaaattatgtcattatagttgatgaagagaaaatatttcaaccaagaactgaattgaataaaactttctcagaaactctttgtttaatgggcaatcacagtatgccagcatgggtgtgccacagagaatcaaagtccacagatactgattatattcctatctgggaaggatcagtatgaaatatacatatgatggggctctcatagaatgggatattttcccccttttcctctcatttctcaatgctcctctgggaattgtgtgaaggtaaagtcaaaaagaaagttcttacattcttaaatcctctgtaaaggatctgaagctctttcttggtaaatttgctctgggcttccagaagctcaagggcttcaggccgatgcctgacggtggccatctccagttcatcttccacgctgtctgtggaggaaaacaagaaagagtcttaggaccagccactgctcaccgatgcttacacagagcaacaaaggaaaacggaagaacatgtctgctaatgtctgtgactgtccacagaggaaggaccctcacaatgcctataaggcctttacatttcccagtttaagcgtattaagctaaaacacttgtatatgatttttttgcatattcttgtcattaatgtagatattacaaccctagcattgttttaagacaacaaaaaagagcacaggaatttatttcagataatcagtggattatatgattacgtcaaacaaaaagtttaagtagcaatatatattactctataaatctaacagtaacatatatttcttttttccccaacgtttaagttcagaggtacatgtgcaggatgtgcaggtttgttacatgggtaaacatgtgccatggtggtttgctgcacagatcatcccatcgcccaggtatgaagcccagcatccattagctgttcttcctgatcctctccctcccccaacaggtgcccagcatgtgttgttccctggcagtgtccatgtgttctcatcaatcagctcccacttacaagtgagaacatgcagtgtttggttttctgttcctgcattagtttgctgtagagaatggcttccaactccatctatgtgcctgcaaataaaatgatctctgtcctttttatggctgcatagtattccatggtgtatatgtaccacattttctttatccagtctatcattggtgggcggttaggttgattctgtgactttcctattgtgaatagtgctgcaatgaacatatgcaggcatgtatctttataatagaatgaattatattcctttgggtatatacccggtaatgagattgctgggtcaaatggtatttctgcctctaggtctttgaggaatcaccacactaccttccacaatggttgaactaattcacactcccaccaacagtgtaaaagtttccctttttctctacaacctcaccagcatctctagcatttttaaggtatagttagaaaaacatagaagatcacaaatagtccaacctggaatttgtttctatataacaaccactagttataaacaatggaattgtcatttaataataatcagttttgtgccctatgtaaaatgcaactacaagatagcctctgataatgttcactaaggattccaatgaaatcagatattttgcacagctacttgggaggcggaggtgggaggactgcttgagcccaggaggctgaggctgcagtgagcagtgatggcaccactgcagtccagtttgggtgacagcatgagaccctgtctcaaacaaacaatcaaacaaacaaaaaaaatagaaccttagactctcagaatggaaggacatctgaagaaagatataaggagatagagaaagaaggaaacctccctaattcattctatgaagcatcaccctaataacaaaaccagcaaatgacataaccaaaagagaacactacagactgatatccttgatgaacatagatgttaaaatccttaacaaaatactcactagctgaatccaacaacatatcaaaaagataatccaccatgatcaagtgggtttcaaaccaggaatgcagggatggtttaacatacgcaagtcaataaatgtgatataccacataaacagaattaaaaacaaaaatcacacgatcatctcagtagatgctgaaaaccattcaacaaaatccaacattcctttatgattaaaactctcagcaaaattggcatacaaggcacataccttaatgtaataaaagccatctatgacacacccacagccaacataatattgagtggggaaaagttgaaagcattccctctgagaatggaaacaagataaggatgcccactctcaccactcctcttcaacatagtattagaaatcctagccagagcaatcagacaagagaaagaaaacaagggcatccaaattggtaaagaggaagtcaaactgtcattgtttgttgatgacatgattgtttaccttgaaaaccctaaggacttctccagaaagctcctagaactgataaaagaattcagtgaagtttctggacagaaaattaatgtacaaaaatcagtagctcttctatacactaacagtgaccaaacagagaatcaaatcaagaactcaacccctttacaatagctgcaaaaatataaaatacttaggaatatacctaacaaaggagtcaaaagacctctacaaggaaaactacaaaacactgttgaaagaaaccataagtgacacaaacaaatggaaacacatcccatgctgggtagaatcatggatgggtagaatcaatattgtgaaaatgaccatactgccaaaagcaatctacaaattcaacataatccccacagaataccatgattattcttcacagaattagagaaaacaattctaaaattcatgtggaaccaaaaaagagcccgcatggcctcatagaaaaagcaagactaagcaaaaagaacaaatctggaggcatcatactacctgatttcaaattatactataaagccatagtcaccaaaacagcgtggtactggtatgaaaattggcacatagaccagtggaacagaatagataatttggaaataaacccaaatacttacagccaactgatctttgacaaagcaaacaaaaacacagagtgggggaaaggacacccttttcaacaaatggtgctgggataattggctagcctcatgtaggagaatgaaactgggtcctcttctctcaccttatacaaaaatcaactcaagatggattaaggacttaaatctaagaccagatactgtaaaaattctagaagataacattggaaaaacccttttagacactggcttaggcaaggatctcatgaccaagaacccaaaagcaaaagcaaaagcaataaaaacaaagataaatagctgggacctcattaaactaaagagcttttgcatggcaaaaggaacagtcagcagagtaaacagacaacccacagagtgggagaaaatcttcataatctatacatctgacaaaggattaatatccagaaagtacaacgaactcaaatgagtaagaaaaaaaccaacaatcccatcaaaaagtaagctaaagacatgaatggacaattctcaaaagaagatatacaaatggctaacacacatgaaaaaatgctcaacatcactaatgatcagggaaatgcaaatcaaaaccacaatgcaatactgccttactcctccaacaatggccataatcaaaaaatcaaaaaacagatgttggtgtggatgcggtgaacagggaacacttctacattccttgtgggaatgtcaactagtacagccattatggaaaacaatgtggagattccttaaagaactaaaagtagaactaccatttgatctagcaatcctgctactgagcatccgcccaaaggaaaagaagtcattattcaaaaaagatacttgcacatgcacgtttacagcggcacaattcacaattgcaaaatcgtggaaccaacccaaatgcccatcaatcaatgagtggataaagagactgtgatatatttatataatggaatactactcagccacaaaaaggaaagaattaatggcatttggagtgacctgaatgagattggagactattattctaagtgatgtaactcaagaatggaaaaccaaacctcgtgtgttctcactgatttgtgtgagctaagctatgagaacgcaaaggcataagaatgatacaatggactctggggacttgcggggaagagtgggagacaggagagggataaaagactacaaatattgtgcagtgtatacgtgggtgatgggtacatcaaaatctcacaaatcaccactgaagaacttactcatgtaaccaaataccacctgtaccccaataatttatgaggaaaaaaagaattgaaggacatctgttcattttacaagtaaagtgaaaaaagaaatcagatattttgccttgggctacaaaataaaatgttcatattaggtgctgacaagggtaaagtaaccagcagccagttggtttcatgggtacatactggatggttgggggcctagaggatattctatttaggtccattttgtagtcaatagagtcaataggtatagagaagctttaaaatattgtactttgctttgtgaattatgtttacgctataatttctcaaagatgttttatgcaaaaaggaattttgtgcccatagatgtttggaaaatgctgtgaactttaatgtagttttgtcacaaaatattaaattatataggtttgcgaagacctgtaacaaggagtcttgtttaactttgcgtaacccaactgaccccaaaggtatttgtccatagaacctttcctggcccaagtaacatctggtaatatctgcacatttgccctagggtcatgtaagcacaagtctggaggatttggaaatatattagggttcaggtgcttgtgtctcaaatatcatccttcagtccagctcctttgaagtggggtcagatagtggcctataggaattctctctgttgtgtaaaccaatccacacctcagatgaggaacttagcaggaataaaaacatccaggctcagtatgaagccttggcttcccctttctatcctttcttcttgactacagattggagactcagagagaagggtctaaggataacagtcagctcctctcatcccagagccactaggaccccaatcccttgtcccatgggtcagttggaaatgtagtcctttttgccaaagtcgagccatttttgacactaatattgctgcctcttgctaacatctgttcctccttactactctgcctcactgagagcattgaggggccaaagctctcacttggcaaggaagagaaggtgagtggcaccctaatcttagcatatcttaattattgccctcaaggagtttacaaaaaaaaaattggtgatgaaacaaacacttggagtggctatatttgtgaaaatgagtaataggagatgaaaacaaacatttgctttgtactttttatattataataacttatctggaaagaatgaaatggaaaagcttcagaatagtgacggatgaataaaaataatagaaaaggacatggaaagatgagaaggctgacaaggataaaattgatgggataaaattgagctgacaaggataaaattgatgggaaagtaagtagttgtgctcctaaagtatgtgggaagagctcaaagtagctggaaaaaggcacctaggcattaacaaattgatctgggctttatggggaaaatcaaaaaagccaaaatccttcaattttctccttcattcatttgaacaaatgggttgattctattcaatgggtcctgagatagaaaagatgatggaaaatgttgcttttagactgctgttgatccaatgacttcaactatgttgtattattgtatttgccaatgcaggagtaaatagcatgcaatagacctcatgtaaatagataatatcgaatagaaagcctgtgctttcttgaacaatgtctgatgtaatcttcttttgaatcatttatagtgcaagttcttcaacctaaaatgttccactttccttttccacctgttaaaatgtatatatctttcatgatccaatttaaatataagtgtctcatttctgaagcctctctggattcccatactatgcaaaattggtgaccccctggtcatcgttcccacactctggttcttgtatagcatgtaaaacataacatcatgatctgctcatgtttgttttctccattgtgagttttttttgcagacaagatcaatatcttacatgtcttgtttatcctctgaacctaacaggaagtctgatactcctttgtcacttaagaataatctggtaaacaaaggatattcctgctcaactttctgatcctctccaatcccttgaatatttgctgccctatagggaaatatttttcagactgaaatttgtgggctgttggtggacctcaaatgtcttcttcagaatcactatgttctctatttattgtactgggaaatacagcaaaagtagaggggattttaattaaattttctgagcagtctttcagtcataacataaccttgtctagacctagtgaccctcacatgggacagaaccaaaacagcggattaaattctgggcctttgtatcgggcagcaatctgagctgtgctacaaatggagtttctttctctgcagatgcaaagtctgagacaaaagacacagggctggaggatcagtataattaagtgtgcgtgataggatgatcatcacatgcagtattaaaaaaaaaaaaaaaacgcccttgaagtgtctgcctgtgggctctcttgcttttccagctgtctggtaccttacttcttaatgactcctacctgccaaagggctgtttctatttctaggcgggtgacaggctctaaaaacataactgaaatcatcagcaatcaccagcatatgataagttaaaaaagcaacaccaccgaacccaatcaactctgattcttggaggcaaactatggggagcacggcatgatcccacgtaggactgcgaattctcattgtgactcagccaccttgtaagagcctgtattttgggtggttttaacccagtgcctaacatttattgagcccttgttgtatgccaggagatgggcaaggtgcttgattggcataatcctaatcctcacaataaccccagagtgaggtttaattgtttatttttcacatacatggagactgagtctcatggatgtgaagaaattcacaaccagaagtcaaatatgtgtttatatatacataaaaacataacatatatatctcctatgcatatatatgggtttccatatatatgcatagggacaagatttacacccaggtctttgatgccacagcttatgttcttcccacttcccactttgccacagtctcttttaataccagcagaaataatgatacaaataatgataacctctcctctcttattttgtcaaactcctcagaaaagttaactgtattcattagatccattttcttgctctctccttaatctactgcagtctgacttctggtcctatggtggactgaattgtgtccctcctcaaattcatatgttgaaggtctaaccctgtatttggaggtagggcctttaagaagatagttaagcataggccgggcgtggtggctcacacctgtaatcccagcactttgagaggccgacgtgggtggatcacctgaggtcagaattcgagaccagcctggccaacatggcaaaaccccccatctctactaaaaatacaaaaaattaggcgggtgttgtggtgggtgcctgtaatcccagctactcgggaggctgaggcagaagaattgcttgaacccaggaggcagaggttgcagtgagccgagatctcgctactgcactccagcttgggcaatgagagtgaaactccatctcaaaaaaaaaaaaaaaaaaaaaaaaaaaaaaagaggaagacacgaggaatgtgggcttacagaagaaaggccatgtgaagatggagtgggaagatggctcacagctggtaccttgaccttgaacttccagcctttagaattgtgagagaataaattcctgttgcttaagccacccagtctgtggcattgtgttatggcagccctagcaaactaatatatctacctatattcaaatgacacacaacactgataaaagcaggtcttgttatccacaaagtttgcacaatgagtgctgggcagtttgctagccaattatgtcatttaatcttcacaacatctttcaagagaaggattatcatccctattttataaatgagaaaattgaggcttggagagtctaagtaacttggccataacccaagcaactcttggccaaatggctacttagtaaacaagatgaagacaagtgtctccagcagcccaaagtccaggttactgagcactatgctgggaatgttaatagcaaccatcaccctatggagaacttttgctctaagcgtggttgtatattatcccattttaatacagacagaagttcagtgagatagctacattttacaagaagtcatgtagccctcattttacaaggagtaaattgggactcacatttcttaaataacttactcaaggtcatacagcttacaagtgacagggctgggatttaatccctggctttttaacaccaaagaccatgagcttagtcaatatgctactttaagagatggcaacaattaaattactttgttcaaaatcctaggggataaaagattttaaatcacaaactagctggctgctgagcctccaatgcctcaatttctttccagggaaaatatgccggggcaccttcaggagatcaccagaccagcagacaaagctgtgctgataagaaacacatggtagaataaggtacgaagtgatgggatctcagagctggaaggaacacaggaaactgtttgtttttctgcattttacccctgagaaatttagatttgggaaagatgaatgtttgtttgagacaaaaaccagaaccagatgggactctggcctctggagttatctccaggccatgcagacatatcatcactcaggtatcttgcagaagagccaattcaaatgcgcatttgcatcctgagataagcgaaatacaaatagtattttaattcatgtatcttctaacaaatttaattttaatcagacaacaaattcccaaacccagacaccattgagcttcctggctgtgtctttttgtcctttgttctttagatttcagtctctcagggctgagtttgtcctaagtctgactcaacagtcccctcaggccatgacacaattgggctagaaattggaattcaaatcatctaggaacaacagaatgcgttttaaaaatagtcatcgttctcctctttctcacaacttctcttaaaatacagtagaagcttggtacagctcaactcgtaattatgcaaatttgactctaagggcaaatcatgccatccagaacactactacggaacatcttgccttacgaacaaatatgagcgtgagtcctaccttttgacgacatgctttggaaacaagtcttctaatgcagaaaacaaataatattatgaagaataatgtcactttttgagaaagctgattcagaactcaggccatgtgtgcagagatgagtccttgcctataaagcatgaaacactgtgaggctgttgccttgttcttttatttaggtcctgccaaaatacgggaaggattatcttatttggcacactgaaggtgctccataagagaatgtgaaataaataactacttgaagcattccaagaatagtgagtgtatctacagcaggtcccatttcttttttttttcttctctttttttctttttttgagatggagtctcgctcttgttgcccaggttggagtgcagtggtgcaatcttgactcactgcaagctccgcctcccaggttaaagcgattctcctggctcagccttccaagtagctggaattacaggaacgccccaccacacctggctaatttttgtatttagtagagagggggtttcactgtgttgattaggctggtctcaaactcttaacctcaggtgatccatggacctcggcctcccgaagtgctgggattataagcgtgagtcaccgcacccagtcccatttctaaatacaacatgactcttctttaaaaataaatgtatccatttgtcattctaaaaagattataaatattgtaactttaaaattctatttgagctgaaattaatttgtctagacaaaaattcagcctgcttgacttatattgctttatctcattgataaaaataccctctgagccattactcctaatgtttacattttattaaattggccgaatagtgagttgatccatatggcaataacataatgaggatgatcactttctaatgatatcttatgtattattaaatatttagaagcttggtccagtggtggatattggaggaagatttccaatgctgaaagattcttgaccatagcattagatgctattcctgagaacttctaggataaggaggtgatgctattgtttgtttaatgttcaagtctgatacatcaggacaaagaaaaagctgcctggaggaagatttccaaagcgaattttcatggcactgatataatttatttccacccttcttttctactgcaaaaacttgtagagggatgacaacatactcaccattccattcctcggttccactgctcacaaagctcaaagagggtggcatgataatcagctgaggaaatagtttcttgggtggaggaatttgctgaagtctgcacagctgtgcagctgatgagtgtgggcacggggagccaggacctgccccaaacctgtctttccccttcctgttatatcatttgacctccctggatagagagtttaaactggggccaggccctgtaagcaactctttaaactttgacaattttaaatgctttattgcaagaatgcagaggtctgggaactcctttgacttttcctgtctttattactattcacccatccacctaccaagagttattttcaggtgcacatggagagtatagaagcaattaattccaagctgatcacacacaggctgcaagtagagagcagtcaatccatttgaaacactgtgggagtcctaggccttcccagaccaacccgagcaattggaatcctgatgttttagttagtttgacacgtatttctgcaaccctggccctgaatgtatgttagaaccaaaatacaaaaacaaacaccaaaaaatgaacaaaaccatttataattagtactttatcttacttaatatttgtatatcatattgaaaatgaacagttcttggaaaatggccatttagtttgaacatcttctgttacaggtacttgttggcaatgacattgcaatttccattctaggagaatgagaattgctttgcaatttcataattgaattcaatcacttatgaaatataacaacccagtggtgaacagctgaagctatttgccacagcacttatgaaatagattgtctctaccttatttacaaacataaataactcttcaacaagcttagattttaaaaaataatcacctaattggaatgcttattatcagcattaaccatattattactacagcatcatgaatggccccttatggtaggagttattattattattattattattattattattattattgagatggagtcttactctgtcacccaggctggagtgcaatagtgtggtctcagctcattgcaacctccacctcctgggttcaagcaattcttctgcctcagcctcccaagtagctgggactacaggcatgtgccaccacacctggctaatttttgtatgtttagtagagacggggtttcgctatgttggccaggctggtctcaaactcctgacctcatgatccacctgcctctgcctcccaaagtgctgggataacagacatcagccactgcacctggatgagttattattttttaggtggtagggtcttaattgatttttggtaaataagaaaaacaaaaattatactgccagtcattatgctcagacagaaaatctacaataggaatgctgagggggcagaggaaggaaacaagaaatttaattgaacttacacataaagacagaccaaaagagattgatatactagtcaggaaaggcaaaagctgagagggattatgagcaaagagaaaaattttaaaaagcaatggtatgtggagagagatgaagaaagcccagattagttcactaaattaaaaatgccctatcaaaggagtgcctcaaactttgatagattttctcttagttgtcctaaaaatcaataacaagacacacatatgtgtatgttcattacaacactattcacaatagcaaaggcatggaatcaacctaaatgcccatcagtggtagactggataaagaaaacatggtacatatacaccacggaatactatgcagccataaaaaagaacaagattatatcatttgcagaaacatggatggagctggaggccattatccttggcaaattaatccaggaacagacaaccaaataccgcacgttcttgcttataattgggagctaaaatataagaacacatggatacatagaagggaacaacagacactggggcctagtggaatgtggagggtgggaggaggaagaggattaggaaaaataactaatcagtactaggcttaatgtgactgtgcagtgggttcaccttacccactgcctagacagagccaatttatcaagacaggggaattgcaatggagaaaaaataattcatgcaaagccagctttgtgggagacccgagttttattgttactcaaatcagtctccctgagcatttagaggtaggagtttttaaggataatttggtgagtaggggctcaggaggtggggagtgctgattcgtcagtttggagatggaaccatagggggctcatagtgcggttttcttgttgtcttctgttcctgagtgggatctcagaaatggttgactcagattatcggtctaggtggtatcaactgattcatcaagtgcagggtctgcaaaatatctcaagccctgatcttaggtttacaatagtgatgtgatccccaggagcaatttggggaagttcagactcttgcagccagaggctgcctgacccctaaactataatttccaatcttgtggctaatttgttagtcctgtaaaggcagactggtccccaggcaagaagggagtcttttctagaaagggctattatcaatttgtttcagagtcaaaccatacactaaattctttcccaaggttagttcagcctacgcccaggaatgaacaaggacagcttaaaggctagaagcaagatggagatctctttcactgtcatgatttcctcagtgaaacttttgcaaaggaggtttcattaatacctgggtattttcgaccagacaaaataatctgtacaacaaacctctgtgacacgagtttacctaataacaaacctgcacatgcacccctgaacttagaagttaaaacgaaggaagaaaaagagcaaagaacaatcactaatatttatagcatttgttttgtgtaagctctctctttcatgagtgtatatgtatatatatacacacacacatacatatacatatatacatatgtataactagatatacgtacatgtaaatgtgtgtatgtatacatacatatgtatgtatacgcatgtatgtatacacatgtatgtatacgtatgtatgtatgtatatgcatgtatacgtatgtatgtatacatatccatgtatacacatgtatgtatacatatccatgtatgcatacacatgtatgtatacacatgtatgtatgcgtacatatgtatgtacacacatgcatgtatatatgcatatatatgtacacatatgtatgtatatatgcacacatatgtatgtacacatatgtatgcatatatgtacacatatgtatgcatatatacatacgtttatatgcatatgtatgtaaacatgtatgtataacatgtatatatgtatgttatacattttatatatacatgttatatatatataacatatatatacatacactcataaaatccccatcagcgtactataaatgctatattcttgttctgtagatgaagataccaacacagagagactaagtaacttgctcatggtcacaccataacagagtcagggaatggagtctgggaagtctggttccaggattcatgtaataactattcagctgttctgcctcccccagagcaggagagaggatgatgccccacttatctagaattcatgcacccaaataagaatcagaaaattagtagcaaaagggctctaagcagaaaatggaactctgtgagaattgaaaggggtattgagtccagccccttaactttgtaagttcatgtcacatacagagccttagctacagtggttgtaaatcaaaaaccattaggcatatcagtggcagaactgggcctaaatcttgatctttttcattcctactgcagcactttgtcagatgcctgcctcagtatcttttatggataagagtgtcttcatccttactgtacccacagttttagtaagcttccgattccacatcagaagcagatactgataatggagaaggagcatacactggaaggagtccatgagccacagttataatacctaattttcaccactggctcttcattatcatatctgagcaatgtgatattctgtgtataaatattgtcaccctgcttttatagataaagaaatcagggttggaagaaaggatgtaactgatgaaggacatagaaataggacgttatggagtcaggacttaaacccaagcttactgactctgaagactagaagtgactgcaggttgtctgagagtaatggagggaacataaagttgaaaaacatcataggcatattagagaaaagagtaatgacaaaagtcagtggctaacttattctttaagaataagttctaaccttattctttaagaaaatgttttattctgcttactttattttagaaggtaacagaaatgtgatacatttttaaatattattaattaaaattggcagcttattcatagtagccaaaatatggaaacaacttatgtccatcaataaacaaatggataaagaaactgatatatacaatggaatactattcaacattaaaaaagaagatcctactatttgtcacaacatgaatgaacctggaggaccttatgttaagtgaaataagcaaaacgcagagaaagaaaaatattgcatgatgtcatttacataaagaacctaaaaaaatgttgaatacacagagatagagaataaaacaatggttaaagtggggaggaactagggagatgtaggtcaaggtatagaaagtaacatataggatgaacaagtctagagatctaaattacaacatgaaaattatagttaatattgtatttgtgatctttgctaaaagaatagattttagatgctcttgctacatataaaaatgggtaactatctgagataatgaacatgttaatttgcttgactacagtaagtgtttcaccatctatatgtacatcaaaacgtcatgttgtacaccataaacatataaataacattttaaaacgtttatacaccttctgaaattgagtcagtaataaagaacctgccaactaaaaaaagctctggaccagatggactcatagctgaattctaccagacatactaagaagaactgataccattcctactaaaactattccaaaatatcaaggaggaggagcccctccctaactcattctatgaagccagcatcaccctgataccaaactctggcaaggactcaaccaaaaatgaaaatttcagacaaatatccctcatgaatacagacaaaaaaatcctcaagaaaagactagcatattgaatccagcagcacatcaaaaagttaatacgccacaattaagtaggcttcgttcctgggatgaaaggttggttcaacatatgcaaatcaataaatgtgattcactacgtaaacagaatcaaaagctggaacattatgatcatctctatagacacagaaaaagctttcagtaacaccctatatccttttatgataaaaacccttaccagactaggcatctaaataacatagctcaaaataataagagacatctatgacaaacccacagccaacatcatactaaatgggcaaaagctccaaccattcttcttgagaattggaacatgacaaagatgctcactctcaccactcctattcaacatggtattggaagtcctagccagaacattcaggtgagagaaagaaataaaaggcatttaaataggaaaggaagaagtcaaactatctctcttcactgatgatatgactctatacctagaaaatcctaaagatcctttcaaagggtgactagaattgataaacaactttagtaaagtttcaggatacaaaatcaatgcacaaaactcagtagcatttctacacaccaacaacgtccaggctgaaagtgaaatcgagaacacagtctcaattacaatattcacaaagaaaataaaatacttagggatatagctcacccaggaggtgaaagatctccacaaggagaacgacaaaatactgttgaaagaaatcaaagtgacacaaataaatggaaaagcatttcattcttgtagactgaaagaatcagtgttataaaaatggccatactgcccaatgcaatttatagattaaatactattctagtcaaactactaagaacattcttcacagaattagaaaaaaagtattctaaaattcatatggaaccaaataagagccagaatagccaaagcaatcctataagcaaaagaaaaaataaaacagaaactaagcccaagacatcacactacctgattttaaactctactataaagccacagtaactaaaagagcttggtactgctatacacacagacacctagaccaatgaaacagaatagaaaacccagaaataaagtcacacgcctaccaccgtctgatctttgacaaggctgacaaaaacaagcaatgaggaaaggactccctattcaataaatggagctgggataactggctaactatacacagaagattgaagctggacccccacctttcaacatatactaaagttaactcgaaatggattaaagatttcaatgtaaatctcaaactataaaaatcctggaagacaacctagggtatacttttctcaacatcaactgtggcaaataatttttggctaagttcccaaaaacaattgtaacaaaacaaaaatagacaagtgggacctaattaaactcaagagctcctgcacagtaaaagaaattatcctacacttgatcttcgtggatgaagctggaggccatcattctcagcaaactatcgcaaggacaaaaaaccaaacactgcatgttctcactcataggtgggaattgaacaatgagaacacatggacataggaacaagaacatcacacactggggcctgttgtggggtggagggagtggggagggatagcattaggagatatacctaatgttaatgggtgcagcacaccaacatgacacatgtatacatatgtaacaaacctgcacattgtgcacatgtaccctaaaacttaaagtataataataataaaaaaaagaagctatcaacaaagccaacaggtaacctacagaatgggagaagatattcacaaatgatgtatccaacaaaggcctaataccaagaatctatacagtagggaacttaaatcaacaagctaaaaccaaataaccccctttaaaaacgggcaaaggacatgaatcaacatttctcaaaagaagacacagaggtggccaacaaacatgaaaaaacactcagtattagtaatcatcagagaaatgtaaatctaaattacaatgagataccatctcataccagtcagaatggctattattagaaagtccaaaaacagatgctggtgaggctgcagagtaaagggaattcttacacatggtgggaatgtaaattagtccagccactgtggaaagcagtctggagatttctcaaagaacttaaaacagggctaccatttgacccagcaatcacattactgggtacacacccaaaagaaaacaaataattctaccaaaaagacacatgcactcatatgttcatcactgtgctcttcacaatagcaaagaagtggaatcaacccaggtgcccatcagtggtagattggattaagaaaatgaggtacacagacaccatgaaatactatgcagccattaaaaaagaaggaaatcttgtcctttcagcaacatgaatagggctggaagccataatcccaagcaaattaacataggaatagaaaaacaaatactgcatgttcttacttgtgagagttaaacattgaacacgcatggaaataaatatgggaacagtagacactacagactactgggaaggcgggacattgaaaaactacctattgggtactatgctcactgccaaggtgacaggatcctaattccaaacctcagcataatgcaatactcccatgtaacaaatctgaacatgtacctactgtatctaacatagaatttgaaaaagaagaacattactgtaaagagatagacatacaggtaatgtatttatgcaaaatatcatgcctaattcataagatgttactgtgttgccttagaaagtaggcagtacacagatggaattgattacctagtgagttaagcagagtttggataagcatagttataataaatttttgctggtatattagggggatgatttgcagctaatatcagtgatgacaaaagtattctgcactaaaacatttatccatctatgtttaaaaaagctattaggaaaactgagcagtgatctgggttttgttatgttccttctacttttaacctagtttcctccttggccttaattcccccacatgttcaatggcatagaaatagacaaaaaagtagttaatattatagaataaggtaactgtgggcattaaatgagatggtatatgtgtctggcacatagtaaacattcaattaatgatattgttgttcatataatgagtagtagtattagaaatatttgcagtaatatctagtgttaccttcaacactaggagcagaacagtgcctgggagtgctaattctgacaaattattcagttcctctgagctttccttcttgggtctatttcccacctctggctggacaatgtgtttaatgtttccaagccttaattttaaaatttataaactggggataatatttgtatcaatttcttaaagttgttttaagagattgaattactggcaggcagtaataataaattacagtaatgatgactattataattattgcatacatactaattgaggtgttattctagaatatttaggagtgaggggtctaacacagcactttctgagtttgaatcatttttctgactcttgttagctctgtgtgaccttgggcaaagtgcttagtctatgcttcagtttcttcatcaataaaaggggaagagcaatggaacctactataaaatgttgtcaggaggttgaaataaaataatgtgtataaaacatgtaaaatagtggctggcacatagtgtttaaaatacttattattatatcacttattaaaatgttctttgagataagtatgattttgcccattttcgatgggtacattgaggtacagagaagttgaataaactgtccaaagacacagagtgataaggtttggctgcgtgtgcccacccaaatctcatgttgaattgtaattcccagtgttgggggaggcacctggtgggaggtgactggatcatgggggtggatttcttccttgttgttcttgtgatagtgagtgaattctcaggagatctagttgttaaaagtgtgtagcactgcccccttcactctgtctctcccactccaccatgtgaagaagctgcttgctgccccttcacccgtccatcatgattgtaagtttcctgaggcctccccaaccatgcttcctttacagcctgtgcaactgtgagttaatcaaacctcttttcttcataaatcacccagtcttaggtagttctttctagcaatgtgagaacaaactaatacacatggcgagagtaattctgtcatttgaaaaaatctttgtcccctaaattgtacccagctgcttcattttgcaggcacttcttgctgttgaattgctaattgtgggatccactagaaaccacagctccctgaggaccttttatactcttcctgtttggaattgataggggaataaaaatcatcttttggaatagaatttgagacaataactgagctttatagtctctcatttcctcccacacaacttatgatttaatatcctgaatggtttgctattccctgaatgaagtctgaattgccaacttctgtgtttttgcttatcctatccccactaaatgaacttgccgttcttcctcctcaaccttctctgtctctattctctaaggctcatttcagtggggaaggggcttcacagaggagaggcctcctgagacattcacacaccctgtgcacttgtcacctctgatggctttgtatatcaatgatctctttgaatatctgtcatttcctctgtgatataaacatttagaggcaagagatctatcttggttatcttattaccactaatgcctagtatggcctgggcattagagacaatttattcatttattcattaaatattgattgagtgcctattatgacccaggcattggtcaaggtacaatggacattagaatgaacaaaaacaaccaaattctctctcccatgggcctgaaattctaatggaagagtcaccaattggacatcggagtggcaatgtcaagtggctggatggagacatggttctgaagttgataagcacagtctggctgaagatgtgaatatcagagtcatcactatataagtaatattaagaccatcaaactcaatgtgatcactaaggcggtatacattggcagaaaatataacagtaattctttcttttatggaatgaaggaatacatttaaaaaaaaaaattaaaagggccagggagtggcagggactccagagtaggaaagcccaaagcaggatcagcctagaaatgaccattttctaagaattacttttcctgtgggtttcctctcctggtggcatgtcacagagcttcctgttcatggtggtattcaccaacaagaaaataactgagcagcatggctgtatttaacattcattcaacacagacacagtttccacatggtctttacatattcttcatgtcttcaaacatttgcccagggataaacagtgtctctctttgagttcttttttcctcttagtccaggggcagcttgcatgtaaacatggcatccaaataatgatgcctaaactcatcttgatgtcaccaagatgtggcagtcatgtggcaaaaaatcataaaatctcccacaacattattaagtgaaaagagttggaagtgagttcagagaactcaggaaaaatgctttgcaaaacaaagcatgaaaatttactgtccagactctgctccatttctcccattagagtataatctttcatagtgtgtggtatatcatagcgatgaatccacatacaggatttctgtaatgatatgatgattttgacactgatccttctaacatctgctcacctaaagcattagtttcacactgctattgaaataaatgtgatttttaatatcctcaggaacactcaatgaagaatatgtccacctctaagcagagtctgaaaacactgtaatatgctatgggattgtttttctccccagcctcaaaggagaatggtttgctgaaagataaataaggttttatactgtcagttcatctccagaactcatcttttgttcttctacttcctctttttaatgaaaccttacaaataaagatggaccaatattaccatcaagaattgctgcctgtcacacttggtgcttcaaaacccttggcaaaaggcaatttgaaatgtaagaaggctaaacttgaaccctgcaatctaagcagataaaaaaacaatgctctgtattttatagacctggtggagtagaaaattgaggctctttgaagaattaggttcccatttcagcagaaaccagactcatcgaccagactcatgtttagctcaaatattactttttaggccaatgaaaatggaaaataggttgtatagctcctacgagaagctaccttggttaccattatgaaaatattacataaaacaaagaaggctctcatttatctaacagtctacacagtgttttgtaagtagtcatcattctacccattctggcccaaattaacagtaacaaaagtggaaaaatcaagtgggaagcaaaagacttaatcacataggtaacctgaaaaaaacaaaagatgcactaatcaaaaactaagcttgtttaattcttgtttcaaaaatttgtgttattcaagtatttaaagccaagatgtctaaaataaaactaccatctctccctaactgaccttcatggccttccctctatgttccttatcttgataaatttcaccattatcattttggtggagtcacttcatctctttcctatctttcactcaatatcacaaattgtttttcaatatttccaattacgcacaattccaccatgtgtttcaaatttatcctctcccttccaccacgattgccatgttttgacttttgtcatctcttgtaggcagggcagtctagtggtaaagacactaagctttggtattatgccattgaaggtaaaatccctgctttgatgtgtcataattgttaggtgctgggtgagtgatttaatttctttgtttagttttctcttttcagtggaggttgtaattgtaccttcctcacagacttgcagtaaatattaagagtaattgttcaggcttaaaatagcattatgctcaagtgttagctattgatactgtcttgcacagacttttcaagcagtttccaactaattttcttgtcgtctttctctttctctctcaacaatttgtcttctgacttatttttggtgttattttaccactgagtttcagttggttcattgattcagaagccaatatcccactaagtttggttattagttttgacacctgtctgtctcttgtcttcaaatattgttcttgatcctttgctagtcttttctctaacttcaagttcacatcatcccttctaaaatttggcacatatctagctccctctactcttggctgaccagccatccccaagtgccagacaagatgaaaaatcactcctcaacttaaaaacctaacttaaaatccccattgcctctctgcagagtgaatgcagcatagtgcccaggaaagttttcaaaatctggccccagatcactttgctggctgcttctctttcatacttcttgcccctcctgactggctaagctttatcttttgaagtacctagaatgctcctcctttttttcccctctgatgaaatgatgattcttctccagagggccctgctgaaatattaactctttgtgaaatgcacctaggtgagattgaatttcaccagtatcactacagtagttgtgatcatcgtagtagcaggagaatgacagcaaaaacagccaacatttagtgaccatgtattagccagtaactgttctaaacactttacatgctcattaatcctttgagcaaacttacagattatttactatcatttctaccttatggatgaggaaattgaggcccagaagggataagtagcttaactaaagtttctataactagttagtcacagaatgaggatttgaaccaaataggctaatcccagagttatcacgttcaactttttaactctagtatctctctagttttgcctctcacagcattcacagcactttacttgtattcgttgtgtcttagatctacatatgtgtctgtttatttcagtacaatgttagtcttcagatgtagtgatctgagtgttcccctgtgcctggaactattgcttttcaaatagtgttccataaatgtctgccatattgaagtgaaattcattaaatttgtcaacagaaaacaggtgtcctgacactcctacctctagctttcctatactaaaacctgtgaatgatttaatgacaacttctggtagatatataatggaccaggaaaaaaaacccgcaattttccttttttcactaagtatcaatgtgactttgggcaagccacttcatctctttttttttttttttagtttggaagatagagattataacccttgtgatctgccattatcaaaggggttttatgaaaatgaaatattcaaaagaaagaattttaaaacttgtaaaagcccatacacgtgtaagaaacaaatattctaataggtaaaacatatagccaatatctgaacgatagggccaattggtattacagcagggttaaatggagtttctaatgtttcccatgttctgcctttcatggacagtgaagtaccacaaaaggaggaaatctgtgttagctttgaaacctccaccatttgtcacagccagaaataatgccgtctcaatggctgctgcaatgctagatctggaaagagacttgggcacagtctctacttcttattcgtggatggtgaaaggcccagagagaaggaaaaaaaaaaaactcattcaaggggctaccaccatcttcctgcacaatatgtgctgtgtatgacggtcccatgttgagcaggtaagtggaaaaagatctagtcatatttttttgtaaaactgaccagaacgttgaacgtaactagagaattggtaaagtacagagactttgcagctccactgctgtgttcaatctcttcccctactcccatgcctcttgctgatgatgtgattcagaaattaaataatccctcatacctcagtttcctattctgtaaaatgggtataatcctgtccaccttacagagttatttttaggatataatgagttatactgtgcaagccacttaaaactgtaccagacacatagtaagttctaaatgtttgttaaatagataaaaataacatctgagggtttgaacatgacacttttagggcttaaaatgaaattgaatgaatcttgctttctattaagaaatacgtaaatattaaatttacatttaacatgggttatgcctctgttcttccacagattttcctgactacatgcctaggtcagagcctttagctaaattcaccaaggagttagcatgagattaattaactgtcagaggttaaacattaaaaaaaaaatcctggaggttactgttgtatttttaatgggcaacatgttggccattcaagttgctttttgcaaacaaatcctccaacagccaaatgctgatggtttctctgccaacagagcatctaaaaatttctatgatcaatatgctaccgggaaaaacaaaacacactgaaatgttatggtatatttcatgccaaaaacctgaaacacagttaggaaattatgttttgcagttatgcaaggcaatgtactgatggtggtttattgatgagtggtctagtctcaccataaccttgtcatattcatgctcccatttctgctcaaataaaaaacaaaaacccctggaatgaagctctaatttagtgaatcaattattttgattgaatgagggcactgagatagtgctgggtagatgttgttatgagttaaatttagataaaaatgtgaacacatacaaatatacagataatcaagtgttgaatgttttatcttttgtattatttcctgaccattatctagtaagtgcctttttgtcaaataatgtccattgaatgagtaaggaaaatgactactttattctttggtaaaagaactggggcatagagagataaagtgagttactcagagttattcaataaggagttatagccagagacttgacagcatttattctttctttaaaaaagtgtttgtgcttacataaagtatagtagctaggaatttcttgacattaagtcatccataaagtagctaaatcccttaatcctgtaaatagctactcaatatcaatgtacattcacgagccagctgtcagcctccaagatgccacggaattgggaagaaatctttttttttttgttctgagatggagtctcactctgtcgccaggctgtagtgcagtggcacgatctcagctcactgcaacctccacctcctggagtggagttcaagtgattctcctgcctcagccttccaagtagctgggactacagacgtgccaccacgcccagctaattttttgtatttttagtagagacagggtttcaccatgttggccaggctggtctccatctcttaacctcgtgatccacccacctcggcctcccaaagtgctgggattacaggcgtgagccaccgcgcctggcccatgaagaaatcttataagaggagtgtgactctaagtctgactgactcttagtgtgactgactctaggaattgtcgctgatcctgtagatcacaacacctggctcctaagatctacagactctggaaaacatcttccatcatttagcctccttctttctaaatgctactatggttctggaaggctgacctttgtggacaatattatctggactccttgcccttctggtttcccattgggtttggccacgggtgaagaggaaaagggagaggttgtggtacttatcatctgggctcgctctttggtgagttgacaatagctgcatttcttatccaaggaccagagcccttttttattgttacagctatagctatggctttttccaccttctagtaaccatcaacctagaaatcgtaactttcgttcttgctaacactgaatgtttcatagccttattggctcaataaaccctgcgcatacctttgcaaattgtcccttcattcaactatcccctgttgccctatttaaatatgcctttttttccttcctggaccctgactgatactgaatcatagaatttcagtgttggaaagtactggatttggagttgagtttctgatttcagatttttttcagaagctctgtgattttgagcaaataatctcccttgtctagtcttcagtttcctcatatgtaaaatagcctatattccttatagtaggctattattattactactattgttataatatgctgtaaatcacttaaaatgtgatgactatttctttaaaaaccatgtagtccaactggctctcctgggtgccaaccgtatgaaattttcttttcctctccttgaatttttccagtaagttttcttctatgggtatgacagtctcaaatcttgcagtcagacagtaagcgtatctgtatcactggagtaaggttcttttgggtataagtttttgtttattcaacttctcagttgtgggattctgctcaaatcattataaccttttcaggccacagctacctcaattgtgaattgggtaaaacctatcctcctgcaggcaaagggccagagctaatgttttctctctctctttttttttttccaatttaaagatttacattaggaaaaacagctactactctagacctataagagctccctcaatcaatatcagaggtcatcagtggagctcagcctgctaaagtgatgaagacagcaggctatggagtcagaattctagctctgccaactggggcatttgttttgtttctatgtgcctcagtttttttagtcattctatgtacctacctcagaaggtggttgggaacatcaactgagttcatacttgtcattgattcatgctcatgatatttcctatactaaatactttgcatggattattcccatgacaatccattttctgataatcgtaatcttttttgtctccaataaaccatggccctttcctccttctaggacactctctccagaccttcacattactggctttccttttattttaaggacttaaaagacatcttgtcaatgaggctttctctgagccaatcaagatatgtcccctgcatatattccctttccatcatattaccacaggtttacttctgctataacacttatcacttcccagattacctttgttttcttgtttattctctctcttcctacataagctccaggaaggtagtaaactgtgttccactcttcactagaaagtgagtgtctagtatcatgcctgccctatatggtctctaaaaatattgtggaatgaatgaccaaataacgaaattaagaggtggagaatttatgtaaataagtttacagtaataaacaggcattttgtttagtatgaggcacaacaggaattcaaacacatgccaggatgatgctaaaacccacaatgcccctctttgcctctttcaatagttcttggaagagatcataaaagtctgagctggctcagagctgtagcaaaagagacaaaaaaaagtgaaattaaaagatattcagagagaacactgaccagagtttagtagccattaagatggtgggtgggggatcattaagcagagagaagattccgacttcagcaactggacagctcttgatgccaatgaatgatataagacgctcagagtgagtgctacagagtgatggtgattaggagactacatctggctgtgcattcatccgcatcctgggatggaggttcaaagagctgcgggcaattgactgcctaggggatcgtgggatgggccaaaaatgtgaacaagacaattctttgttcacagccaaggtactgctgactctatccctgtctcatttcttactctggttgaggcgatactagtgtcaggtggaagacattctaaggcctaaattaattctcattagatgatatctattactcttgctcaactaccaatcaggtagctcgatgggagaaggccattggctatggcatagatctgtcacctcctgtcttgaagccatgtgtgttgcttcctggtacatttccaagacaatggcgctttttgatatttgtctgatagtcttctcaaacatcaaagtcaagatatgtggtttatttaacacagtagtttgggacttagaagttttgcctttgacattttaaaaatgagaaatacatttaattttcaaacatttaagaatgtctatggttcttcatgcagaaaatctttgtcatatgctgcttcttttaatgctttcgtttgaggcacaaacaccagaactaatagtttaaatctgtatttaacaaatgactataaaaggtatataatttcgaagtattaagaatattatgcctaaataacaacagaactcaagaagaaatatgtatgctttgctgaaaaacatttgaaaggccaatttgtggaaaaattttctaatataaattgggaagcttgcattcagataaatcagttcttttatccaataattcaaaatttaggggaaagtaattttaaaagcatagatagatatatacacaaagccatttatcatggtgctatttatattgagagtgggaggtaaaaagaggaaaactctaaatatccaaaggcagagaatgggatcaaatacaatatactagagttatgcaatgtagtattatgcttgccattaaaaatgattttataaaaagttttaatagcagggctgatatttatgaaagtatatcatgtaaatgaaataataaaaatttggtattgatatgacataattagtacatatacattgatgggaaaaaagatattactagttatttgtagttacttcatggtagcagattatgtgtgtgtggcgtgcacgtgtgtgtgggctcttatctttctttgcactttccaaattgactgtcctgaacatgagagacttttgcaaacatgataaaccattcacctttccaaccctggaggagaaggcgaaaaaggaagaggagaaggcaggagtcttatggggtccacaaatcacgagctaagtctagcgtaggttcagtatcagccagtactatacaatcccattagtatttaaagtgattctgatcatttttttagtattttctattttttttcctctcaaaacatccttttccctcacagttagttgaaaattgcattgcatcctctgtgaacatttatttgggggcatggctttatcagacgctggtgcagaagagtgctaacgagacatgacaattttctacttctctacgtgaatacagagatccatttgaaagttacattttacctatctacagtgtacaaatgactatattttcagcaaatatctaataaattggcaattttgattccaacctgaaaggagaaaagcaatgactctaataaccaacaatctttgacaaatagtggcaataaaagtgcctgcagcttcaatatcatgtaggattagggctctggcatttttctagattatggtcttccaggttgctgatgatgttatgttttgtgagatggtgtgcatgtgtgtgcaatgaaagaaaaaaatcacagcaatgtatctaaactataattttaatttttgtatgtgcattggcttagtgctaacgaaagttatttagttctgcctcctctccccacagaatataatgtaagctctaatagaagagctttctttgttttgttttgttttggtttggtttttaatctgttttagtcactgctccatctcccagcacaagaagcaggcagtgacatacaataaatatttgttgaatgaataagcaaattaattaaatcttattatgatgatatatcacctttggtcagtgccattgaaacaaattgctattctattctgggacttttcactgaatgtattatgttgtttgtggttctttccatattttctcatttgtgttgtggagacccatgacattttagtgcattcatatttttaaatcactaattgaatccatgagttcctacaaaatggtgtagcagtataaaaagcgagtaggtggagctgtgggttatagccccaatactcagggaattccacctagatttttaatgttgcattttctcactagcaaataacaccaccttctctgtctgattctaagagttgtttgatgcttgaaaaaaattgtgtataaaagaaagtttgtacacagagaatatttgtcaatgtatattctaagttatatagcatctttataaaataagctgaggatttcctttagatattcctctattttctactctttaagaatgccacaaaatagagaaaaagaagatggagaatgtgatggttaacctcacttgtcaagttcggcaggctatagtacacagtgatttaatcaaaccctaatctaagtgttgctgtgaaggtattttgtcgatgtgcttaacatctataatcagttgacattaagttaagcatagattaccctgaataatgtgggtgggcctcatctaatcagttgaggcttcctgaagaagaaatcctgcctcaagactgtgacatcaaatccttcctgaacttccagctgccagcatattctatgaatttcagacatgccagtccccataatggtgtgagccaattccttcaaataagtctctttacatatatgcatatgtacatgtgtgtatatgcatgtgtatgtatgtatatgatatgtatatgcttatgtgtatgcacatgagtatgtattggttctgtttttctagagaatcttgactgatacagggaaagaatcaacaaagaagaaaagtcacgtttatttaaatgacactttgtaatcttttttctaatctagtgatatttctgaatttgggcagtgtccactgggattatagacccagtggatgagagtcaaacaatgtacaaggtcatatgttaaagtgtccagctgctctgctaacaaggcaagcaataggaattcctacagttacttgagtccagtccccatcccttacatcaaacaaaaatgtcccagtgttttgcaggacaggctcctgtcactaagactgtgctgtcagtctgcaaaatggaaaatgactcctaattgcccaaatgttctcctgggtatttaggtaaacatgagtacatcaatagattgcttttgtagaatatactgattctttgtagagaacggcaatgcatgcaggcctaaagaaacgaaacaagagtttcggaggaaaaaaaaaaacaaaaaaacaaacttgctttgaatagcaggagacgacgttttggcagctgagcagggcaagagcttcatgagccgctctttaatgctgcgcttggtgctgttctgagcgtacaggaaacctagaagatacaggatcagttctgttaatgctgtctgcagagagaaaagggacgtgctgcagggtttatcagagaagccaggcaggaaggatcagggacgcagccatccactcaggcaatcacaggcagtgggttgggacccccgaaaggaaaaaaaaagtttgttttcttcttatttagttttgtttttatttctaaatgttgttttgaagataatgacgaacaagtgaaagcagaatcgtaaaatatatctattgaacggcaaaagattaaaaaaagccaccaaaaaaatctggtggtttttttttttttttttttggcccttagatcagggataaaacaagtatcactagaagagttaactggattgaaatttcaatattcaaaccagcgctaagggcccacatgacaattttctgctattgctccccatctttgattatagcagagatagatgcttcacataaatcattcacaccacaatcacctgttagtacctttgccttcctgaaaatgagaaaataaatgtccttaatatgcagcttcattagcatatactgacatgcccagagatgtgacaatctttcccattttttacatgtggacgctaatgaatggaactttttcaaacagactaattctggaagaagccagacaagcttgtcaaacattaacccaggaatagacggagcagtatgtgtgacagcagatacctggagatgactcaagaaaaatcaaaagtggctggacgggtgagcttgcaaactgctgaaacaacttttgatgtcaggagccaactatccaagtcagcatcaatttacccaccctgaggtctcagacacttggatgtcatgttaataggtaactagcctccccgagatcagcatgcaaggtgtcaaatataaagcatcagcgcagaaaacaatttaaatcgaggttctaccatctttataacaggaatctggcaaatgtatcacttgttccttttctagttcttatcttggaattataaaaaaattcctgaccacaagcctactgatttagtttcctaaatcatatgttgcacccaccaacagtatccactggctaaaactcatgtgtgtgtgtagagtaggatgacaaaatgaagtagtaaatacacaaattaaataagatcattcctctgattaaaagccctctaaaagcttcatgttgtttttctatcgaggacgccaagtatgatctggccctgtctgagtctctggcagcatttgcagccactctctctgctttctgggccatccactattggccacactaccctttttgcctttggtagaactcacaaagcaggccgtcctctggccttgacacttatgtggtatgaaatgtctcattcaactgctggttgagggtctggcatgtaacagaaggtcaataaatgcctggcaaatgagtaaataaattcactttggatatctaaagaagacttgattcatttcctagattagtatctaagtaagctttttaaaaattttactttaagttctgggatacatgtgaagaacgtgcaggtttgttacataggtatacatgtgccctggtggtttcctgcacctatcagcccatcatctaggttttaagctccgcatgtatgtgtagagtggggtgacaaaatgttataaatgtccttaatatttccctccccttgacccccaccccctgacagacccccgtgtgtgatgttccccttcttttaaacttgcaaaataaatctggtttacataaaacacaccctatattttgcttctgatttccatttctggaaggatgcaacgatttaactaccctctcctttgcaaactcctccaggacatgagggtcttactttagctccctacacaggcactctgctcctcccctttatgccatttcaaacctccgtgccaggatatgtgctgttccctcagttttgtcagctgttcaccaactctcaacttctgtatcccagtgcagccttttttttttttttttttcaagacagagtctcactctgttgcccaggctggagtgcagtggcgcgatctcagttcactgcaacctccaggttcaagcaattctcttgcctcagcctcatgagtagctgggattacaggtgcatgccaccatgcctggctaatttttgtatttttagtagagacagggctttgccatcttggccaggctggtttcaaactcctgacctcaagtgatccacccaccttggcctgccaaagtgccaggattacagacgtgagctactgcgcccagccccatgaggcttttaaaactcagttcaaacacaccttcctctggccatctttccctcttgtgtctccaacttgcctaaaagaagaaagacctcctccctcccctgcttcccaagctaactttgggagaaatttagcttatagtttaaatgataatggcccttccccaaaactaaactgcctttgtaaagctaatgaaagatcaccaggttaggaggatgagaggagcgtgaattctgctaaggtgtagccataagctattaccagccgttattctcgaggtcatgagattcataacttccccaattactcctgcagataacatcactactgtagaacctaagattggctttttgagatgtcttttcaggtttttgcatttctgacaatgaatggcttcgcccagacctgccaaccagtcctgtgaccctacccagaagccaactcagcatgaggaccattttccatatccctaggattgcaccccaaccaatcagcagcaccctttccattacccatcaactatccttgaaaaaccctagcctctgaattttcaaggagtcttatttgaggaataataaaactccgggtctcttgctcagctagctctgtatgaattaagctctttattgcaatctctctgtcttgataaatcagctctatctgggcagcaggcaaaatgaacccattggacaggttacagtatctgcttcaaaaagttaggatcagaggaaataatatataaagcacttatcacagtgacagccacataatgcagtccaaacaaatattaatcattttgtttcacttatttgagtataccctattccctactgtctcagggccttttcacatgctattatctgaatctaaacttctgctttactttctcttcatctggttaatgcctgttcatccttcagatttcagttcaataactttttgaggaaaaccttatagggcaaaccaactagattatgaacagttattatagatgcccatagttttctatgtttctccatagcaagtataattaaaacaattcatgatacaattacatatttgacacgtcttccctactgaaatggaagatggaagatgtctacttctagcctttacagaataaatgttactggatatgctataccactgtaaggaaccatataactggacaagctacatgagggaactctttccaagaattgaacaataaacaacatagaactgtgatgcttgagagaagaaaaatcccagaggtgtgcttcacaaatgccctggctcgcccctgcctggtgacatgttccttccatagttcagggaggtagagctcatagtcactgagctgaagtggcagagattagagttccaggctcctgaagtggctggaatttgtaggccagggttaagagagaattgatgtatgcgtgtgtattctgcaggtagctggtgggtgggaaatttgtgtgaaattaaatgtgggttattgactaagggctgggatatgcacgatatccaaggcttcccaatgcttagcaggcagggctgagaatggaatgaaataacacaagccacatagagctggaatgctgcaagttgttagagttctagccctgccagccttccaaagaagacttcactgagcacctctggcgttgccctgagaactcagaaaaaccactttgggagtaaggataatttcctagagtaagggccatagtgtatcactgaggtaatagccaaagttgactgatcctaacaaagaatagacctaaagctagaaagaccaaaaagagctgctgaactgtagaatgcttcgaaacaatattcaatatattttaaaagaaggcaacatgacccaaactccttacaatgtatcctaataacatcttttgtactataaaaaaattactagacatgtgagaaagcagaacaaatgtgacccataatcaagaaaaaagagaagtcaataaaaacagacattaggtagcacagatgttggaagttgtaagaaatgacgttaaagatagtcataataagtaaagaaaaaagttcagaagagaaattaaactacaaaagggaactaaatgaaaattctagaaataaaaagaaaattctaaaaggaaaacttcattagatggacttaacagcagactgagaactactgaagaaaggattatgagcttgaatagagatgaaaaggaagaaatctgaataatagaaaaagatttaaaaataaagagagctttactcatctgtgcatcatatcaaaaagtccaacataggtataattaaagaacataatgagaggtgagataaaattttgaagcaataatgaccaaaatattccacatatgttttaaaacacaagtgaaatctgttgaaccaaaagaagaaaacttaaagtataataaataaataaataaataaataaaagaagaatcacacatagctgtaggcaaaatgctgaaaatcaaaaatgaaaaaaggctttaaaatgaaaagagaagaaaaggacccgtacatacaagggtcaaataatgtaagaataatttttcatcaagaacagcagaaacaccagaaaacaatggaagagaatccttaaagttctcaggggaatacagagactatcaacccagaattttacctatgtttttgagaatgaagttgaaataaagatacttttagataaaataaacctgggataattcatagctaaaagccttgcattccaagaaatgctaaaggaatgtcctcaggctgaggttaattggcataatacggaaacttgactctacaggtagaaatagagagcacaggaaattgaaaatatgtgaataaatatattatcctgttttcctttcctactttctttgtttaaaacagcaaaaaagtattgtagagtttattacatttgtagatgtaaaatttctgacaataataacatgaaagttgggggagggtcaatggaattttaatgtatgatgcttacattttacatgaagtggtaccatatgaactcaaaatagtctataataaatgaaggagacatactgaaatctctagatacaagggaagcagtaaaaaataatataagaaggtatagtcaaaactccaatagaggaattaaaatgaaatatataaaatatttaattaatttaaaagaaagccagggaagaggaatagagggacaaaaagtagaagggatgagtagaaaatacataagatagtaaatgtataccccaccatataattaaatcagaaattgtattttttattcattactgaattcccagtatgttgcacagtgcttagtatataaaatgttcaatcactatctactgaaagcatgaaatcagactatatatcttttatgattgtctcagtatgtgcagatttgctacttgtaattagcagatgcatttagaatgtacatatatgcttcctcacagtgtgtgaagcgatccctaaatagatagctgtgtgtgaaggcactctcttaaggatgatactgacagaatgaggaggtgggactgaattccccagccaatcacactaaaagaaagttgatggtgaatctccaaactgccttagtatgtaggacatttaccctcacagagactaaacactctttgttttcattaatttattaagttaatatgtatcgccacctacaatggacagattcatatcttaaattaattggctacataaaccactgagcctaatgagagcattcaaaattaagtcaaaataatcctagtttacctcaaaatccttgtctttctccaaattaagggcctggccagctgtcataaattacatattccttttggtttttttaaaggttacatgttcaagagagtgaaaataagatgttctgtctaaaggctaccatgcctggtttgtaaatgaacctgttaaatgctgtatttgctcccacagcttactacagaatgttacttaatacaatatcatacttattacaatttttactataggagtgtaacaggtaaaattaatctctattttagtgggcccatgtttagtctttcaccatcctttaaattgctgtgaatttttttgtcatgacttgaaagcaaggatagagaaacattttagagatatctgggtttttttccattccagaacttgtgaggataatcatatttgcttcatatttatagtcatgaactcctaagctggcagctacaaccaagaaccaaaaaatggtgcattctgcttcttgtaattcatctctgctagtaaattataagaagcagggaaaatattttatttggatggtttctataaacaagggactataattcttgtacattatttttcatccttgctatttctttgagcagtctaatgtgccacataattatctaaggtatttgttttctataagaattgtttcacaagtattcttgttatcagagtagttgtattatatttcaaaatgtaagatgatttttaaaagcctgagtactgacctaagatgcaactgtatgaactctactctggagggcggggagggtgtcagtggaagtcgtaagacttttatttttttgtgccatcaaatacaggtaaaaataattgtgcaattctgctttttaaataggaactattggcctgcttggccctaaatggaagggctgatattttaagttgattattttattgtaaattaatccaacctaattctttttaatttggttgaatgtttttcttgttaaatgatgtttaaaaaataaaaactggaagttcaaaaaaaaaaaaaaacaaaattaagtcaactcccatacctctgcatctagaagtcaaaccaaactgctagtatactaacataacactttaaagaccataaaacaaagcaatacaaaaagagatgaaaaattacttttcatctcataaatatttgtccaaaaagcattctttataatgtacatattataagcattataaatgatgttctttgtagaactgtaaatatacagtggctacatagaaaaaaaatccctgctgtctagaatctaaccatctgcatctattataatacctatgacattgcagatcccgaattccctgaggggaggattctgtttgtttatgaattaactcatttaaaagcatttgttgaatgctaactatgtgctaggaactgtctcagatgctggcaataatgcaccgaatgagccagccaaaaaacttctattttagtggaccttacacgatatttaggaaagaaaaaataatcaacaaaaataaatagcaagttataaagtatatcagatatgaaggagggatggggcctagagacttctgttggtggatatggatatgggtaagaaataggacggggaaagacataattttaaatatggtggccagggaaggtttcattagagatatatttgggcaaaaatatctacataagatgaaaaggtgtcttatcctgtttcgattattaacaataacagtgtattacatatattaggtactaatatatatttgttgagtgattcatatcacttattaatttattaagttaatgtttattgctacctacaatgggcagattaataaattagttggctacataaaccactgagctcaatgagatcattcaaaattaagtttactcccatatctctgcatctagatgtcaaaccaaactactagtatactagtacttcaaacacgataaaatgaagtaatacaaaaagataataaaaagtaagtgtgtaaatatataggccattctaactgtgctctaactaaatgagaatgtattcatttttaccaattggaaaggttttatcttataatgcctgacattactgaaaacacgtcagcctatcatcatcttgattgctccatttttctggtcatgcagacctcagtggtggcatatgcaagtggtcattctccactggctgctttttgtgttacacaggaaatgccatcacatgtcagtgtcatgtgtcagtgctgagcgatgggccatgaattatgaattcaacaagtactgacagtggcaatgaaagtggtaatttcaccataatgagaactattcttatcttcctcctttttgcagtacagcagatagcaaaaacttctatttctcatgggttagcttggaaataatggctcgtactctattaattcacagtcccgatcagcttctattttgtacttttgaaacacggacaatgtttttcttcctagattttaagcctgtagaagtctggtggaagaaaatggcaaataatgtttctacagatctggtgtcttcccatgaatcaataactatgacaaaaattgggctgagcaaggtggctcatgcctgtaatcctagcactttgggagtccgaggcgggctgatcacgaggttggtagatcgagaccatcctggccaacatggtgaaactccatctctactaaaaatacaaaaattagccaggtgtggtggcaggtgcctgtagtcccagctactcagcagactgaggcaggagaatcacttgaacccgggaggcagaggttgcagtgagccaagatcacgccacggcactctagcctggagacagagtgagactccgtctcaaaaaacaaaacaaaacaaaataaaaatcaccaggagtttcaggggtactgtgatcccatctgtgttctttgagtcagtgacaagctgattcatcagtagtgtcatggatgctgggaatagggagtacatttttttactagttgcaaatatgaacttatttattaggtttgggcaaaagtaattgtgatttttaccattgaaagtaatggcaaaaactgcaattacttttgccccaacctaatactatgatgcctatttttaaagtggacttacagttcataaatactagcatgactacacaaacaaacacatacactcagaattcatttagtattttcaaattcattcctgaagatactaggccccagataacttggggttcatatgctggtaataattcttgcagaaaattgctgcccaaccatgcagttgttattggatcttgcagtcagccccaaatcattcacttttaagagaagtagcaacagtgttgctgactgaatatgaggaaaatacctacatttcattttttaactttttgaacttgggaggcagaaaatgaccttcctaattgacctgttttgttatgcttgattataaaatagtttgtgtatcagtttaaaagaaggcaactagaaggtgcttgaatttgctgaaaacgatctacagattccaaatgcaaatggagtaaatttgactctacttagagtggctacctaaatacacctgtttctcataaaattaatgctactctctgtcagcctttccatctctctatctgtctttctgtctctgtctcactctttcttagtctttgtgcctttgcttttatctttgtctctttgtctccctcttcttctctgtctctgagtttctctggctcaatgtctctctctgtctcattgttctacatctctgtttgtgtctctcctttatctttttctgctctgtttctgtctctaccccgactcagtctctctctcaatcaaggcagggtcctatttaatcttctttaccttggtgttgactgtgttcttaacaaaacatttagagagagttttggtcagttgagtgcagaataattattgcatgttatctgaggcaaatattagcaaacaactggatggtcaaaagctgtaatgctttctaaagccgcttctaagtgtgtttgtttttatcacctctctgctgtactggcagaactagccagagaatactagcagaaaacaacatggaaaaggcatcaattttccttgggatcttttaagattgaccaattgaacctcaattttcccttgctcctctgaacaatttgccaaaactacttctacagggctatcctttgtgtggggtttggaaattatctggagttccttataaatagggtgacaagaccttcgtttgtccaggatgctgccagtttatgggagttgtcctaacaccccatagtctgcacccccttttcatgttcaaaaatgttcttgtttaaatggtaaattatatgttcatgcaatattagcaaccagtatggtctgttccacagactaaggtacagtcattgactaagtgaatacttcattgcactgtaaacaatgtaaataatgcaatttcattttaaaaaatggtgttttaagaatagctaaattaatagagaaggtgaaataggaaactaaaaatgtttttgtgagcacattaaagctaacatttatgatggaaagatttggaactttagggttcagggagaactcatttgaatctaagcgctgccactttttgtttgtaaggcttcggaaaagtaacaacatcactgagcctctgtttttttttgtttgttttgagacataatctcactctttcgcccaggctggagtgcagcagcttgatcatggctcactgcagcctcgaactcctgggctcaagtgatcctcccgcctcagcctcccaagtagctgggactatgggcacacaccaccatgccccagtattttttttttttttttgtagaaatggggtcttgcgatgttgcccaggttggtcttgaactcctgggctcaaacagtcctccccactcagcttcccaaagtgctgggattacatatgtgagccacctcacccagccaccttgcctctttgatctcacctgtatatgaggtaagcagccaaagcaaaaaggaatttatcaaaaatgacagcagtatctttttggatataacctaaacctaatgtactatttcttttccgcaagctaacacaaataactcttatttatttttatattttttaattgagtttttgatcagtgagccatgatcaagctccatgctggagtacagtggtgtgatctgggctcactgcaacctccacctcccaggttcaagcaattcaccttcctcagccaccggagtagctgggattacaggtgcctgccaccacacccgactaatttttgtatttttggtagagatgggatttcactatgttggccaggctggtcttaaactcctgacctcaagtgatccgcacacctcggcctcccaaagtgctgggattacaggcgtgagccaccgggttgaagcatttttaacaatcaagcattgtaacttcaaacttttctttgggataagccaagcatgcctttaatatcggaaagcaagcgacaggtgagtaaggttgattcttctgatggcgagagaacacaaataaattgattcttaataggatttgggattacaaggtgtattttcgtgttggagtgtccattatacaatgaatcttctcctccaatgtcacccacagtaactagtatatattcttaggtattgtctaggctactctgttcattttatgactggcccatcacctgaccactgccttttaataacatatttgaagggattttcaggaaaaacagtcacttgtttccttttgttcattctttttattttctcttagtataaaatcctgcagaatctcatagtctactctaagagctttggcttctactcagagtgaaataaggagaaaacggaggaggattttttagcagaggaatgatatcatcatataatgttttattcaacaacattaattaagcacctatttggcactggcaaaaacatagtccttgctcttgtgaaatgtataatctaatggggaaggattaacaatagaacaagaaatgaattaaacaatagaacaagaaagtcctctaaatttcatcttgaacatgatcttgttctaagaaaagatgcagacaaataatgcctaagatgcaatgctctaacaacaataagaacaaagagaaccttctatgtgctaagtaccttacaagcatcatattatttaaccttcacaagagccccacttgtggaagataacattatgaaagccaaattatagcagaggaaattgatggtaaagatgcacgcagtttgtaagtggcagtatcaggaatgtgaacacttgttcatctgtctagctcctgggtctgacattctgacttctgtactgcactaacaatggctccacaaaatggaacacttattggatgtgtctaattgtgtagtttctagctgcagaaaatttgtttctctttgtggtatggttttaatttccttctctgcctctttggttaagcttcttaacccatcttgtcttgaatatagtcctgagagcatggtgtctttcattcctttgctagaaatgctacctctaattctatttgcagtaggacatccatcaaattcctggtggtattaaaaaataataatgtggtttaggagaaagctgcactaggagatccaattttttcatctgaaaaatggggctaataatagatgacactaatctcaaggaagttgggagatgaatgaagtaattgtttctgcaaaatgcttcaaatgccagaagaaataacatataatccattataatttttgatgtgagacagtactttcctttcctgagttcttttgtgtcactgtatttaattttcatcttttaacaatgtatttatattcaataaaagtctttattcattaatttaaccaataagtatttattggatataaggtagaccctgtgccaggcacccgggaagaaaatcaaatagaatagtcaatgaagcaaagtctttacaatcttgtgaatatccattacttggccatgattgctcattagaatcaccaaggtggctttaaaaaattagccatgcctgatcattccagaccaactgcatcaggtaattctaatgggaggccaaacctgagaaccactgttctgctttgggaaaatatgatgccagataggttttcttaagaactgtagacttttgatattgcaagctgattcctggtgggctagagttggagctttttagctcaaacactttttttttaaattaactgggccaaaaactaaaaatacacatattccacttagaatgttggatttctggcttctgaggaggaactggatggtctggcaaccttttgtctgcatttctgtatagcagaaattggatgggtctggtgaggagctgcccctttcacacaggacatgcatgctcggtttgccagtttcctctgttgcctatcacacccaacgctaagagacaagtcaagtgctattcatcttggttcacttaactcatttacattagctgcctggcccctgtaggaatttaacttttttactctcctctggttgtttacacatggacattgtaactggtttgaattgtgtctttcaaaaattcatgttcatctagaacttcagaatgtggccttatttggaaaatagaatgtttgcaaatgcaattagttaatataaagttatattggtttagggtgggccctatagccaataactggtatctttctggaaggagaagacagacacacagagagggaagcaggccatgtgaggacagaggcaaagattgaagggaagccagctaagagccaagaaatgccaaggatttcccgtaatgaccaggagccaggagaggaacaagaataggttctccttcagagcctccagaaagagcctaccctgtggagaccttaatgaagacttctggcctcctaaactgtgagagaatatatttatcttgttttatgccatccagtttgtggaaatttgttacagcagctctagaaaagtaatacacacatcagttaacagattttcaaaaacaccagagaaaataaaattaagccatgtccatatattcatcccctactgtatatagaacaatgtctgcacacacagaatcgccaaaatgtaagacaaggggctctacttgtagtgccttctcattagtactggtattttttttttttaattactgccaagctcactcatcccaggcaaattagtccaccacacactaccatggagtggatttctacttgtgtgaaattggcatgttctagattctgtactgctagtattaggtaaatatcagttgaggctgagcattcacaaagaactaaactaaaagtaaatattgtccagtttttgtttcaattaattaattaatcacatgtttattgaataactgatgactttccatatcactaacagccaaattccctaattagcaacctgtggacaacccaccccctccaacccaccgcccctaaatctcatctgtctcctcttctattttcctctaatttctttccttgccactgctggtcactgtgcctgaaatgtctcctctcaaaaatcttcaagatctctcccttacctccttcaggtctttattcccttgccaccaactcagtgaggacttctctcacagggcacttaaaactgtgtcctcacgaaactacttcctattctctttcaattttaccccataggttggctaatgttatagcctaaattgtacctgcccctccctccccccgccacccacattcatagtgaagttccaactcccagtacttcagattatatttggagataatgtttttaaagaggtaattaagttaaaatgaggccattagagtggggccctgatccaatatgattggtgtccttaaaagagaaagatatactgtgatgtctaagcccagaggaaaggccaggtgaggacgctgtgagaggacagccatctgaaagccaaggagagaggcctcagaaggaaagacgcctgctggcagttctgtcaggagatctgatcttggatgtccagcctccagaactgtgaggccagtaatttctgttgcttaagccattcagtctttgacattttcttacggcagcctatgatggtgaactttgtatgtcaacttgacttagctaagggatacccagatacctggtcaaatattctttcttggtgggtctgtgtttccagaagatagtagcattcaaatcagtagactgagcaaagaagacccaccctcaccagtgtgggtggacatcatctagtcctttgaaggcagaataggaaggcataggagggtaagttccctctcttcctcagctggggcttccatcttctcctgcccttgggcatcctggttctcaggcctttggactccagaacttacatcagtgcccctttcagactccaacttgattatgccactgactttcctggttctccagcttgcaggtggcctctcatgggactttttggtcttcgtaatcatgtgagccaattcccataataaatcaacctctttctgtttctctctttgtatacatagtctattagttctgtttctttggagaaccttgggtagacaacatagccctagcaaactaacagagctaaccacatgacttattgtccaacctggaacaccactaacaatgaatgaaggggatattattaataatgatatccagacacttggcataaactgtaacttcccatgtatatcaggacatttggtagccttatccatagtacctatcattataaatgcacaatgcactttagttagttagatgtttattgcctgcctctctccaccagatagtaaattccttgagggcagaggtttttgtgcttttactgctttatatctagcacctaagtatctgggacatagtagagtctcaattgaagaaactgaataaataactgtaaactgtaaggatgtggttaatgttcactgatctatctatatttatgtctatatctatatcgtatctatctatctctatctcatctatctatctatgaaactttctcaatgcgactaccaattattttgtacctgctattggctaagcaaggtactaggcattttacatatgttatcactcattttaacaacaactttgcaagctgcttatggtttctattttaaacttgacccaaatacctcagagattttaggtaacttctcctataccgctcagcatatagctaaagattcaaacttattgcaaaaaagatttttgtacattcttggcagttaaacaataacataaatgcagatttctagcttatcaaatttaatgatcaatacttaggatattgttaactgtacatgttgatgtgccagtgttatctacaaattatatcaatgtgggttcagaataaattgtattttttaaaaaagtgtgggtagaaagatctctaatgctttaatcctaaatcctctatcagcataacagaaaaatcagggacaacaaatcaatgtccctaagatggatatgagtagctcttcctgctaatttgatttttagtaactaattatttaggctggcacacaatgtgaaatattgtccttgaaaacaggccctgctgctcaacattttatttattagaaactgagccaggaaaatctagtgttaaaatttatcatagcagctgaggggttatgtcctgatgaagtaaaataatgccatgacaagatgatagatgttttctgatatcttcttatcactatcttgaccagaccaaaatattgcctaagaggattcttttgagttatgcaaagtgaagtcacattttgtatgcaattttgaaataggaccctataaataatcaagtcttacactatttgcaacttgaaaataatgcaatacacaagtttttgttacatttgtcaagaatttcataacttcaaagctggctggctgaatgaatggtgagctctttaggatattgtgctaaggtaatatcccttaaagcttgcagataaactctggacatccttattagccttatggaaaaatccactaagaccttaaactacttgaggtctccaagaacatattcttcaaatagaacatgatccctgtgtaattcactctgactaggcttcatcctaaacacagtggaactaaatttttaatcctgaaaatgctagcatcactcaattccattctacaaatatctgttgatgcttaggacttattaagtctgccctgatactttccccaaggatctcagggttttattggagacagggtgaacttgttaggcataaaataatcttaaaaatgacctcactctgggggctaatcctgtgcctaagtctgtcattcagaatgtgctactgtattgaatctatcagattctccagctcttccagatctcaatgaaatggaatatagggctccttaggaaacccaagaccacctattttagaaatatgctataactaaacattgaaaaaggtacattataagtgctgtcatatgtaagctttaaaagaatcacttataaaggaagaaatgaaacccggggatgatcagaagtctgaaaactaacggagtgtgtacattaacctggtagattactaaggccaccccataaactatgtttcattcacctttgtgtccccagcatcacgcacaaggcctagcattgactgttcaatacatatctgtttaatgaatgcatcattgttggttgaatttcaaaggagaaagagaggcaggcttctcttcataaataaatcatgactttttcaagattcccaaaacaattagttttccactaaagcaatctgaagtgccagatcctggcaaacctttctgtccctgggagacaagcacgttcagaaaagcagaaccttcaaacttgcagagccagctcatacttggtggccttctcaccttaggctactagttactgagagttggggaaagtggggaaggagcccagcactgtcaacagactttattggttgaagaaaacagtgttgttaaaacactcacagatcataaaaagaaaaaaaaaacacccaaggatataaaattgagaaaagatatctggagaaagcaatattgtgttctcgagctaaaatttcataggaagcttttgaaaatgacctcctgggtaaggaaaattatggatcctatctattctctgattgagcaaacacattgaattcaatacaatctcagcaccacatgtgcacagaacagagcaggacaatttgtctgataaatgcgtttatagcaacaatatttatgagatctatgtaggctttgagacattgagctgaagaagtttgagcttcatgttaacaatgatagcaacacaagccattttgttttctttgtgagtgctttacaaagcactatccaatttaatcatgaaaagaaaacagtcctatgagataagcatgaaaaagtttaggaaacagaaaatgttaaagctcaatcgcgtttagttgaaactcctttcttcagttcttcccatactgggtttctctttttctttatgtccttgttatttaaaatgtaataaggacattggtacttattggtctcatcagcctcacccggtagcttgttagcaatgcagaatcttctaactcactcttgagctactgaatcagaatttgcatttaataagattctcaggtgatttgtatgcacattaaattgtgaaaagcattatctacatggtgtcatattagtcatctggaatgcctgcttttggaatcttaattcattatgaatgagggataagtagagggcactgttataagaatatggtgtcaatctatgaatcttctcaaaacataatcagattcaaatattaatggcattggtgatacataggttaaagttatagactctgaatcctggttttgccacttactgtgtggccttgggaacactccttaactctttaagcttcagttcctcatttataaatgagaataagtatactaaactcaagaggttattgtaaaggtcaaatgaaatgagtacccagagtggtcacacagtgagtttgcagtcatatttattctttaagtatgacatgaaacagagattcactccagctgtctatctttccaagaaaggaaaaaaaaaaacacaaccttttaaagtctttcttttagattttcactaagtcattcctttgaatactatcatagagacctgctttgtgttagctttgatctttggaattctgcggtggtacaaggtcatgatgagcttccagtgaattatcccacaaggaaaccttgacacattttctggacttttcaccacagagattactcatgtcttctcatattctgattctaagaggccaaaattattagataatggggtgacttgaactctaccttttttggatacaagtctggcccttctagggttgatacacttcaaaaattcttcttaaaatctgtggaacaactgaaaagaagctcagataaattctcttttccaggagtcttggagacaaggggacagaggaagagtgatctgtgcagggatgctggaaaccacagggagactacaggaattgaatcctagaaaaaggagctgattacaggagggtcagctgaaaacaaggagccacggcatacccagtttagttctctagcaccatcctggcagcaccataccagccagcaaggtattaggttggtgcaaaagtgattagtattgcaccagcctaatattttatttttgttgttattgctattttttgagatggagtttcactcttgttgcccaggctggagtgcaatggcataatcttggctcactgcaaccaccacctcccgggttcacgtgattctcttgccccagcctcccaagtagctggggttacaggtacctgccaccacaccgggctaatttgtgtatttttagtagagacggggtttcaccatgttggccaggctggtcttgaactcctgacctcagataatccaccctccttggcctcccaaagtgctgggattacaagcgtgaaccactgtgcccggctaagcctaatatcttaaagaaaataactaataaaaaattaaatgactgtgttctctctggtatgtgtagtggcaacgtgaagatccgacttttgttctgagtgaaacaagaaacatggaaaatgctttatgaaaacatattacatagagatgacttatttaatattgtgccattgtttctcatatgggaataatttcctatatatgtggtgtgcaatttaaaattagatatcataaaccactagggtaaaaatatatgaggcctataccgggatgctgtttcagcatgcagaatcattattctttatagagctaacaaattcttaaaagacaggctgagagttaaggatctgaaaacactgcaaactatcaaaggcatacgaggaatttaacaatgcaaaatgaaatttaagtgaagtaccttagttcctcttcttgctttcctactgaacagcaaccctatgtctttctgtagaaatgtttattttgcaccattattttgacacgttcaaatatgacactttggtcatatattactgcatatttaagcatgagacatcaatcagatacatgtaagaaatatgttggtttggtccagaaaggcaggacaactcaaagctggggcagggtagccactataagacttcaaaagaaccttggtctccacaatcttttatctgaacctaaacgtttcctttctattgatctcaggtctttagacaaacccaaccaattgccaatcaaaagatggttaaatttacctatagcctgaagcccccactttgagttgtcttgcctttctgaaccaaacgaatgtacttcttaagtgtatttgattgatgtctaatgcctctctaaaatgtataaaaccaagctgcgccccaatcaccttgggcacatgttctcaggatctcctgagggctgcgtcacgggccatggtcactcatatttggcttagaataaacctcttcaaatattttacagagttttgctcttttcatcggcagaaattaatgagaaactagcaatgcctttaattgcctgagctggttacttgagcagactgtcatccacgcctccctcctctgaagccctacttgctgccccactctattagattatcaattttagatcaactgctgcaggtggtgcctggctctacttgatgggctcccctcagtttgccaaagatttataaaagcagtgttttaaagaatggcgtttacccactgagctaattttcctctcagttagaattccatcattctttagccttaagagtaaaaagtgaaaggagaatggaattaactagagaactgcctatagttctctatgtgactgttgtgttacccttctctaatagaataactctctgctcttatggtcaagttggtgtcatccagagatgagatacaagaatccagggaaattttttatcaatgattgattttatggggcattgatttataatagtaacaataatttaaaactatatatatgtatgtgtgtgtgtgtatatatatatatatatacagatatatagatatatatttgaaaccctaggaaagttatatgggcataaaaatttcattttggaatcatttgtcaattttgccttgaagattcagaagccttctggaattttctgaacacaaataattaaacagtataatttccacactatctctctttttaaaaagatgggtgcttaaatatacagaaaacaactttattattgatttttaaatgtaatacaaaacacctaaccaatgcacagcattgaaacaattcatcaatttatctggcatccttgattggagagtccttaacaaaatgctaatttaattaagccttaactgtttttttctgacaccctgattagaaaatgttcaactaataatataatcttaaataccaataatgttttaaatttttacaaattcgtgcaagaactcttgattcaaatttgatttcctttctgtctaaaccaatctatgaggtaacaattttacttgtgtttatccttggtcatctgaggatgtagcagtaaagaaacagtagtcagaaggtgtttttaggagaaggaggaggaggaagaggatgaggcatgggagtaggaataggataaagactagagtagttttggaaaaaagcatttaagagagacagttttttcagcccagttccaagacattagatgatgttattagaacttaaaaggaaaaacgttctgcttgctgaaatgacattttgcatataggaagtgtgttacgttgctagggctgctctaataaaataccacagaccaggtggcttaaacaacagaaatttatctcacagttctggaggctggacatccaagatgtaggtgtcagcaggtttggttactttcaaggcctctctttttgtcttgtatcgatgagcaccttctcactgacctcacatgcccttttctctgtgctagtgtctccctggtgtctttttctctttttataaggaaaccagccatactgaattagggtttcaccctaatgaccttattttaactttaatgagtaaaatcacaacctcacagattggtttagactgaaagaaaatctaattcgaatcaagagttcccatgcatgaatttcataaaatttaaaatattattggtatttaatattacacaggtagttgaacgttttctttcttttttttttttttttgtttgagatggagtcttgctctgctgcccaggttggagtgcactggtgcaatctcggctcactgcaacctctacctcccagtgtcaagtgattctcctgcctcagcttcccgagtagctggaactacagacatgtgtcacaacgcctggctaagttttgaaattttttttttttaaagtagagatggggtttcactgtattggctgggctggtctcaaactcctgatgtcgtgatccgcccgccttggcctcccaaagagctgggattatagctgtgagccaccatccctggcctagtagttgaatattttctaatcaaggtatagggaaaaaaacagttaaagcttaattaaattcgcattttgttcaccacctctttaaaggcttcatcaccaaatatagtcgcattctgaggtactggggtttagaacttcaacatacaaattttgagggacacaattccaccactaacgggtcaatttccccttcttcttctttcctttccccttccccttccccttctcttcctccctccctccctcccttccctcctttcttcctttcttttctttctctctttttctctctttctcttcctctctttctctttctctctctcttgtcgggcagcctcccaacagggggattttaataaatgtctgctgactcttgatggggcaaatcactatcagctgtgcctattgggctgctttttaacattgctgctgagctgttggctagtgaaacatgttaaggttcttctggtcatccgaagatccatgtgccccctcccttatcagtcccttaccccgtctgcactgaattattacaatagtattataactggttatgcagattcatctatgtctcacccttccatgagagcagtctgtctaaagcctagttctaacgaaaaagcccacagtccttcactaattcaggcaacacgtttctgccatgtctgccttgccaggaactccactagacataagagatacaagagagagcagtcaaaactttcatttgctcccccttgccttccagataaagtccaaattcctttgtataacatttagtatttagaccttacccacctcctcaaatgtccctatcctggaattcacaaagggctatttttcacctcctaaacatattttgcacattagagccaatataccctttatgctctctacttttctatctgttccccttcctatagaaaacctacacatccttccattccagctttagacccttgccattgcatattgtagtgagacttcatggatgtatggaatgaagaaggataatttaaatgtttctgaactgagtatctgggaagaatgaggaaggaaccattcaatagagacagagaaaggtgaaagacaagtaggatttgtaaggtttggggcattgagttaagttttagaaactccatgagaacacattgttctgatgtgtttattgttgaatcttcagcatatagaacagtttctgccacacagtagacacacaatacatatttggcttaatgagagtatatgtgtgtagtccttggtaagaaaatgatgctacctcagtagtcatgacccctttatttcaaaagacacacaaatataacaaaattccagcaccacaaaaaataacttgacccttgaggtttatgataatggaaactgagctttaaatgttaacacaggttagaactgaggaaatttattacggtgttttggaaattaagaggatcctccataggtgtttttggggtcaactaatatatattaatgtaagagttttgtctagaaatttagaagctctaactctgctactgttaattgctagatttgcaactttggttcagttattaaagttatctgtttaaatttctataaaatgtagacagataatctacctatctcatgggattattataaaaaatcaaatgaaataataaatatcaaaacatattcaaaactaaaaatatcattgaggtattacatataaccacactggcaataacagacatagtttttttgagtaaactgctatggacaacttcaggtaggaaataaattgttaaaaagcacattcattgagaacttaggagagattggtagttggataatttcaagatatgactgattatttactttggttttttgatttttgtgctgttgttagaaatgtaaatttttttattttttttctttgagacggagtcttgctctgtcacccaggctggagtgcagtggcgcgatctcggctcactgcaagctccgcctcccgggttcacgccattctccttcctcagtcaccggagtagctgggactacaggcgcccgcatgatatcaaattttcttgaacaactgaactattattaatcgtcaagttttttttagctaattccttatggacatttaatcataacaacctattctgataaaagagattcctgatccagaatactgcacattattgtaatgtccctgtgtaccaacttgaggtattaatctaattaaccaaatttcatgtacctgtcctcctatctctattgcagagcctgtcatcattctttttttttttttttttttgagacagagtctcgctctgtggcccaggctagagtgcaatggcgccatctcggctcactgcaacttccgcctgctgggttcaagcgattctcctgcctcagcctcctgagtagctgcgattacaggtgcacaccgccatgcccagctaatttttgtattttcactagaggcagggcttcaacatgttggtcaggctggtctcgaactcctgacctcgtgatccgcctgcctcagcctcccaaagtgggattacaggcgtgaaccaccgcacccggcctcgtcagtctttttgaaagtctaatagcttaaatactaacgattgccattacacacatcttaaactattaactatgctgaaaattcatttggatttgtttctttatgtcttgaagccatcctgtaatacccacttattgtaaagctggttaaaattcctctaaaatagatggaataaaattcatattgagcaagctttaatatgccattttcaaaagagaacaggtcaggcattattttgcaacagagaccaggttctagtgacatctactcagtgatgtttcccctgatatccctgttactgtgcagagttgaccatagttgtaatagctgttatttgtagaactcgatatagagttgcatggcttgggcacactacttatgctgctaaggctcagtttcctcacagacagagcaaggataataatagtacttgtctcatttagttctttgagaggttaaatgacataattcatgaaaagtgctttatttactcagtgctcattgtttagtaaatagcttgtaaatattacttattgttattattgagcataacaactttaaccacagtaaactgtgacaattggcaaatggaaacaacctcatgtcctccaatagggattggtcaaattcattatggtaactttagatgatagaaggattatgcagccattacataatctgttacagaggaataaatatcgacctctgaatatgctctagatctgctaagctaaaaagtaggctacaaacggtttgcttattgaatagactagaaaatcatatatgaaattgttactggtggttgcctttggaatgcaggagtttttaatttttttgttattttactttcgtgtttttctgctttcttcactgttttccatagagtgttatttcatagagcatattagagtgggtgatgttatatgcaagaaatgtatggcccttgtcactcagtgcaccacgcttcccatcattagatatccagttaatgatgaaaatggctatgcatatctctcttgcccatgaccccagcatcttgagattttataacacacacaactgtcgactgcattgcttatgtaaggccacacagagaacagactatcatcccccaaagcacccagtgaatgcttccattagggagcttggagcccactatgagagaaacagtcatgctcacatgttccccttagtcatttctgctgtttgggacacattactttggacacattaagacctacctatcccaaccttatttttttatgcctgcctgcactataaagattgaaaaaagttaatactcacttccctgtcttctttctattcaggactggtgaggtgatacaatgagacacttaccaatgtctatttcattttttttcatggatgggtgaaggcttatgcttttgtgatgacagtcatgactagtacatccttctctcttacttgtctagagagtaggtgcaattgagccactgcatttatcttacagccttaagggaaaggccaaaagattcccacagctgccagcaccgatatcactgagccgctaaatcaatgtgaacaaaaacttcttatttctagtcttctcattaagtgaggaaaataaatttctataggtttaagcagccactgggcagtttttcgatcactgtaaccccaaaatattcttaatagatacatttttcttaataccactgggatccagacctgatgcgtatctttttcgaatgttttgctataataatgattttcttcattctaaattagcttggatttctcctactggctcacctcactttagagtagtaaatctagcactcaaaagacttattttttttttaaagagggaaggaatttttgtgtgtgattatttgtgtgtctgtatgtgtgtgtgtgtgtgtgtatctgttacttgaaggggaggaagcttttaataataatgtacacctttgtcaacagtacatggccaagtacaattacgccctctcaagcatcattacccaacagatctatcacactgtgcctagttcactttttcctttgtcttctgcctagcctccttcaacaccactccaggatgaggaaagtgaaacatggggctgaacatgacaagaatagtgatcataatctatgtttcaaagaagaaatgaagcagaacgagcctaacggaaatttcagagaaagcttttagttctttttccctttcgtaaattctaacatctccctggtccttttgtccaggagttcagtactttcacggcagcctctgattcactgaaatgtacaatgtcttaccaaggttatccatccccatgttaaactctgttccaacataattatctccaataaaacttccctcttcttagtgtttgtaaagcaatctgatggcattgcactgaagatatagttatgcttggttttgcctagatcctctagccccgttatgcccctttgagtgtgacacagctcctagaggcagtctttggacctggttattaacggaagcttttcctcctcctttaacataagaacttcattttttatccccacatattaaaaaaagggatatcttcacctttaataatctgggaaactcacattgaagatttttacccaaaaagagaaaaaatagactccagtggaatggatatttctaacataagagaaaccataatcagacagattatgagaaaagtgaaacaaatctagtttgttttagctgaattgtctgtttcttacagggctatcctttcttcttactaaacaaggaaataacttgcctgactctgacaattacaaattactcttgtttgtagaaatgaccttattttatatgaccaacattacaatgtagcaagatgaccattatgaatattattcaataagtgcccagtttactgtcgtgtaaactgtgtttgcttacagcatttacttcctccatagtgttcagttttcatggttcattatttaagaaccatgcttacaaattttatataacagaaggaaccctaataaagtgtgagtagaaatagattggctttactgtaccatgtctagtggcttgagatgggttaaattaattttcaaagattatatacaaaggagaaaagggtgggtaaatttctggtaatagtttttgcaactttaatattttctgatcccattattcattttaaaagatgagtgcagtaaggctaaattgcattgttctaccgtcttcctgacatcttgatgacctaggttggcagggattaactgggggtttactccccaggctattccttttcgctgttataaataagtcagtgtagaaatggccttcactcattggattcacactctattttaaacccagaaaatacattctaacattttttattccaagtaatttataaacaagtttacaagtccgtcaaacagatttttgaatgactctattatccctcaggttgcagaaaccagaaaacttggaatcattatagaggaatttttgccttcaaataattgtccatgtggataccacactgaaatttctgaagcaataatctgatcactttttaatccagctcacagtgcatcaatgcttcctcagtacaactatgcttagtgataaggtcctctctaatttcgccccttgtttactttgcaattctcattttttgccatatacttccccaaagtaaggccttcataatcttgcactagtatggttacaagaaggcaaattattttacatttctggggctctgactagaattactcctctgcttatccttcaggttaagttctattaacagatatgtttttaaaactcagatttatccagattaaaaaggaagaagcaaaattatctccatttgcaaatgacatgatcttgtatgtagaaaatcctgagagccacacacacaaaaaattagagataaaaaatgaattcagcaagttttaggatacaagatcaatatgcaaaaataaattcatttctatgtgcttgcaatgaataattcaaaaatgaaacctaaagaaattcatttataggctgggtgcagtggctcacacctgtaacataacaactaggttttttatatataacaactaaagcgtaagtaagcaagcaaccaaacaaacaaataaattgaacatcgaaaaaatttaaaacttctgtgcttcaaaggacactatcaagaaagtgaaaagacaacccacaggatgggagaatatttttgcaaatcatatgtctggtaggaatttagtatccaaaatacatagaaaactgttacatctcaacaataaaaagacaaacaacctaattttaaaaatagaaagaaatttgaataggtttatccaaagaagatatgcaaatgcccaataagcacctgtaaggatgctcaaaatcattagtcattaggaaaattgaaatcaaaatcacaagagaccattttatactcatgggtaaggctataataaaaaaggaggacaattatttgtgtgggtaaagatgtgaagatattagaactctcattactgctggtgagaatggaaaatggtgcggccttttttgaaaacattttggaagttactaaaaatgttaaacatagagttaccatatgaccctgacatttcaatcctaggtatatcctgaagaacagtgaaaatatatgttcccaccaaaacttgtacacaaatgttcacagcagcattattcacagtagccaaaaggtggaaacaaccacaatgtccattaactgataaatgaataaacaaaaggtggtttttttcagccaaaaaaagaatgaatagtgatatgtgctaccacagaggtggatcttaaaaacaatgtaccaaaaaaataaaaaataaaataaaataaaaaagaagtccgactcaaaatgccacacattttagaattccatttatatgaagtgtccaggttaggaaaatccataaagatagaaagctgatgaatgttagccaggaactgagagaaagagggaatagcaagtaactgctaatgggaatggggtttcttttggggtgataaaaatgttctagaattagctagtggtaatgattgcataaccttgtgaatatactaaaaaccactggattgtatattttaaaatagtaaaatttatgttatgtgaattatatctcaatttaaaaataaattcagcttatctattaggttctctaggcaaaacttccttacttctaaggctactcccagcactccttctccaattacactactgcagctcatagttctaggcgatttagtgtagtggttaagcagctggacagaatgaatgtctttcttaaaattcctctgtagctgaccaattgtgagcaaattatttaattgcactgggcctcaacttcctcatctgtaaatgggataataatatacctcactcatagggttgttttgaaaattatctgaatcagtattgcaaagcacttgaaacagtaccaggcatggccaggcgcggtggctcatgcctgtaatcccagcactttgggaggccaaggtgggcggatcacctgaggtcaggagttcaagaccagcctggctaccatggtgaaaccctgtttctactaaaaatacaaaaaattagccaggtgtggtggtgggtgcctgtaatcccagctactggggaggctgaggcaggagaatcgcttgaacccgggaggaggaggttgcagtcagccaagattgcaccattgcactccagcttgggcaataagagcgaaactctgtctcaaaaagaaaaaaaaaagaaaagaaacagtaccaggcattcaataagtacttaataaatgtgctattaccattaaagcaattgttttatctattattatgatcgctataaacattcccctaaaattcatatgttaaaaccctaaccccaaggtgatggtattaggaggtagggactttggtaggtgattaggtcatgaggatggagtcctcataaatgcaatgagtgctctcataaaagagaccccggagagctcccgcatcccttttgcatgtgaaaatgcatcaagaaaatggccctcaccagacaccaaatctaccagttccttaatttgggacttcccagctttcagaactgtgggaaataaatttctgttgtttataagccactcagtttatgatattttattatatagctgcccacactaaaataattataattattatttggtatgtctctccagcattgtaccctactgtctatcactataggcacttagagatgtgttgtttttgaatggctggtcccagggtctaattgaagtcactcgtgcctcttcaggctcagcaactcaactatagtctggtaatgatatctttggccaaacagtatagaaataaacaacatggtgggttcagatcttaccaacgatccgaaccctaattagttgaaaacataccaagaatgttgcaatctgcttcttctaaaatacatttgctccaatgaccacagaaagaaagaaacctgcctttgcactagggtctttggaaattaatagaaagttctgagagacagtagttctgtgaaaaggcttagattttttggatgcctgaaagaatgcttacacaaccttgcagtaagagagtctaagaagaaaaacaagttctatcattgcttgtgttccctatcctgaagttttctctctccaaatgactgttttactcatcagtttataatcttctagcatgacatatatttttcaaagcgccaacaaacgctatttattctctacatgaacatttctcttacgtactccaggaaataaaatattatactcaaatgagttcagcttcttgtcctatatgccagccctggcaactgagctgtaagcaatactttttgaagttcaccctcacatctactcagcaggagtgcaaagcaagatgagaaagtggctcattactttttttgagggaggatgagttccagcaaaaaaattaaaaccacaaaatattttccttgggtgacatatactcagactcagcaaaagtaactaaaagataattttttggatatgtgtagctttacaagcaatctattaaaatattttgattaatacaacatattaattttgttctgcaaaataaagaaaatgcctatagagtcaccaggtttttctataacaataatctactaatgttagcttcaagccactctaggacatactgaattttcttctttcttcaatcaagggtttgatgttgtctaatgtgaaacaaggaagaaaatacatacaccttatatgtatatatataggtatatatacacacataataaataaagcaatagtatttgatctactagtcagtgaagaaatgttttatgattatagatacaatatttggaatatttgacaacatcactctaattttatcttctttacacagaaaaatgataaagagctttccctcagtttaacattgcaagcaatcaatgagattaaatgttgctttaatgccagaaaacaaaaacaaacaaacaaaaaagaccttggggcacattggagttgaaaggtcttttcaaactgcattcttacactctcccatttttcattcttttcccatatggctggaaaaggggaataaattttatgatgccccaaaatgcatatttttgagtttattcctgaagcagacagcttcagagaaaaaaaaatgaattagttcaattttccatgttcctctacctcctacagtccttcaagttactttgtggtcataccacaatcagctctgtccaccttcactcacaatctcctctcttataaaatgacccctaactctctcaggttctctctatgatttctgccccaaagagctctcttctctgacctccacccacatttcctgcccacgtaacctcagagtggctttttagaagtgtttacctctttgcagttgttatggtgcacttgcctcatcctgtaaaattgtggtgatgtggcctatttttctcatgagattttcagtagctttatgcactaatagaaaatatatgtgtggtttctgtgtgcaatctaggagaaaaaatagtaccattatgaagtagaggagtgaaacagtgggaaggggaaatgaattttccacgaacacatgaggttcaagagattttagaagttcattttaattggtagcccttagcatccactcaaaaaatcagaaataataatacttataatcacagcacattctggatggatgtagcttctgttagctaaacagaaatctagtttaaaattgcaaaaatctttttccctcccccgggcagttttgctcacagaaagcttggctgttcagctatcaaagccatttgttttcagtcttaactcttttgcagcaacagttaagccaaacccataatggaggaacatttttctaataacctgtgatatgattagcttctccaaagtcctaaactaaactattttagcttaatcccagttaacttaattgtggtcacactcattttatttttccttacctcccctcctgtcctttccctttcatattttttccttttttggttcttccaccattgaccatcttatgtttatatatatatatatatatatatatatatatatatatatatatatatatatatatatatatatataaaattgagatggggtctcgctctgttgccaggctggagtgcggtggcacaatctcggctcactgcaacctctgactccctggttcaagctattctcctgcctcagcctcccaagtagctgggattacaggcacccaccaccacgcccagctaatttttgtatttttagtagaaaggaagtttccccatgttggtcaggatagtcctgaacttgttatccacctacctcggcctcccaaagtgctgggattacaggcatgaaccacccgccccggccatgatttatattttttgaatgactcttacttcaactcttttcccgacaggggtcacacatgtagttatttaaatttctctgttttatgaaatgtctgtcaagcacctccatgctaaactgcttcaccctaaaatgggatagcgagcaagaccagacgtggtcctgccctcaggaagcttatggcctagcaaaagtgggtacctcattcacattaatcattccataacctcaaatgagacaatgtcctgaacgaaaataaataagatttttgagaaaaaattttttttaaaatgtgccaggactgagacactgaaaaaaagattgaaagcacagtctaagctgacatctcagggctgagtaggttactcttgagaaacaaatctggccaggtgtggtggctcatgcctgtaatcccagcactttgggaggcagaggctgcaatgcctgtatcaggaggcagagataaagtgtgattcttctgtgaaagcctcttctagtcagctagcgaacacatttgagtaaaacccaataacgacaggtatgtggaagagatcgccatgttgcagaccttttgttttaacgtgtccaacttggccttcctcaggattggagctaattttcacatgacacagctctaaccttttgcaggtaagaccttttcatttgatttttcctcctttccaagaaaagttttgagcgttattaaaggccaaagtactgaaactcttctggtggaatttttcttctttgtgaattacttacagtgggacgaatgattcaaaaccaatacattgcagagttggacggaatgtgaaacaagctcatctctgctgtttcctccagacagggctactctgctaaaccgtcaagcagatgaggtgttaatcttacagagctttctctgtaaaatgttctagggcctcacaacctctccactgggaagctgttcaacatcttactcctgttttgcactctaggtccatattcctctttattttaagtatagatgaagaactcttcacatacttgataataattggtttctctgatattaaaagaagtcatgggtactagatacaggagcagatccaagtctagatggtgtggattaatgtcaaaccaggcatatcttttttctcttttaatacttttatgggcttttcattttatttcctctgagaagatgaagagtactccataatcacaggaactctccatggttctccttgctctctcaacacataattaagaaattcctactggattccagatgccgtactaggaactggaattcggcagtgaacaagacaaccatgtttcctatcttcctggagcctgcagcaagagtggtctcaccctgccctcttctcctttcctctcctccctgtgtaatacatcatgggtttagaaatggaggaggtggtctattacccaggaatgcactttacatcaaaatcagggcctgtataactgagtccagactcaatccaaatatccacaagggaagtctagagagttaggaaaaccaaatctgtgagcaaaaatgtcaatggcaagtaggccaactgtaagtaagatataatctgggcacaggtgttgcagactaaagctcccttttgctaaggtgctaacataccaaaggggcctttaggcaaggcatccaggtataaaggcccaatggtaagaataacctattttcttttcttgttttttacataaaatgatacagaaagttagagtgattaggattattagcagggctgatgtgagaggaaaagattataatagttataacagcaacaggtatatcatgttttacaacttgacatgccttattcagtgtgtttcagtgaaaaggggtcaggcagacctgagtttcaatctagtagacattagcccttggagagcagaggctctcatgttctcatttgcattccaggctcctattattgaaccaggagcactgaaaggtattccacgaatgtgtgtggatgatggatgagtccttgctcggctgcctttgggcagtttgttagtagaagagtcctttctctcttcttactctcattttttccacattaaaaaaaaaagatagatcgggcgcggtggctcatgcctgtaatcccagcacttcgggaggccgaggcgggcagatcccaaggtcaggatatcaagaccatcctggctaacatggtgaaaccccatctctactaaaaatacaaaaaattagctgggcgtggtggcgggcacctgtagtcccagcaactcaggaggctgaggcaggagaatggcgtgaacacgggaggcggagcttgccctgagcggagatggcaccactgcactccagcctgggcaacagagtgagactccgtctcaaaaaaaaaaaaaaaaaaaaagataaatatgtatgttttaatattgtttggcgggggggagtcaaatgagaaagcagctggtacatggaaggtgctcaataaatgtatttctttaaagctttattattatctctgaatccatttacttaccatcaaactttagtggaactggcctcagaaacccaatttctggctaacacataaccctacattggtaattagaatcctcttctctttctgggtcttgctttgaagtctgaagaggacctgctcgctacttattttgactatggtaatgtttattgaatggctctaggccatttgaaatgagacaagtataaaaaatttaaattacagtattattacaccattcttaagtaattaaattatttcagaatgtaattttcatatattgaaatttataatatcaaattatatgcaattagacgcaatttctaagagatatgagggagaaatctatttaaattttctattttgccaaagttactcagttttaaaaccattcatttcacgtgattctttaattcttgtaggctaaatgactcactgaacaattcctggacagccctgccgatatggactaggaaaaaattaattgtccttgtatatctgtgctaagattttgaaatgattaaaatttgtataataacattaataatcattgtaaagtacagtacttctcatcttgaaaggctttcatttccatctttatgcaacccagacacattatgaacattctgcaaggagaggataacagcacaggctcacaatcatgaaaaggaatattgtggaaccatatgaaatttaaggtaactggggcaaaagatacacagtggggagaggcagggttgcagactggacttttgtctagtcatgtttttatgagacatgcacagtacatggagaagccaagtgatccctgtggacgatggagagtgagtgagaatgacaatgatccacttgcattttaaaaaagataagcttggggccgggcacggtggctcacgcctgtaatcccagcactttgggaggccgaggcgggtggatcacaaggtcaggagttcgagaccagcctggccaatatgatgaaaccctgtctttactaaaaatacaaagtaagccaggtgtggtggtgcattcctgtaatctcagctactcgggaggctgaggcaggagaattgcttgaacccgggaggtggagtttgcagtgagccaagtcacgccactgcactcaagcctggccacagagtgagacttcatctcaaaaacaaaaataaaataaataaaaaagataagctttgccacaggatagaggaggaatttgagtcaaaaagaactggaaacaggaatactagagaaggggttgtttctacagtccagttaagaggtgatgaagaactaaacaagaaaatgtactggtgatgggaaaaatagtaagacacctgactcaagaggtgttcccgaggcaaaactgacaggattggagatagagaattctaagttgacgccaatgtttaaaagcttgtaatatagggctgatgaggatgcagtgagagcgtggaggatgagatgtaggttactttggccgccatttgcaatttttgaatcaaaagagatccaccatggattattgatgagaactgttaatatgtgtttaaaatttcacagtactttcagatatattttctggttagagccatacaataactctgtaaaataggtagatatgcagataagagaagtcaagtcagttgagtaaggtcacatgggattaattgtcagattatttgtttattatgtcatgttactttttattaaacaaaatcagtgaaataaagctataggtaggaataaagctatttcacatttgaacatttatgaaatatctgctgtggatgcttaatatccattatttaatttaaaaaatagaattgcagaatttaaattatggaaaactgtgattgcaaataaattcaatgctaatgaataatatccttttgtgtgtgtatggttctgcatagaacattttatccttttgaaataaaagcaataatgaataagctttgttgaattgctaaaaacaactattaataagtctatgtgggtgatgttaacaagttgaatattaatgaagactatctctattatatttgtcatgaggccattgtctttacagtatgctagatttatgacatccataactataatagttaaacttaagatgaaaacattttttatctcaattaaaaatatgcaaatacatacataattgctcaaactcatttcagatgatgtgagcaaaaataaatggcaaaagaagcatcagttaaataacagtagacttgaatgcaggagacccatattccaagcccagctttgtgactgttaccagttttaggaccttggttactgtgatggttaactttatatgtcaacttgactggcctaagagatgctcagatggctagtcaaatgttccttctgggtatatctgtgagggtgttaactggaagagattagtatttctatcagtagactgagtaaagaagatcaccctcactaatgtgagtgggcatcatccagtccattgagggcctcaatagaacaaaaaggtagaggaaaggcaaattatttctttctttggagctgtgatatccatcttctcctgctcccagacattgtagcgtctggttcgtgggccttcagactaggagtgattacactactggctatcctggtttgccagcttgcagatggcaaatggtgggacttctagacctcataatagtgtgactgtctgtctgtctgtctgtctgtctgtctgtctatctatctatctatctatctatctatctatctatctcctattggttctatttctctggagaaccctgactaatacagtaaataaatttacttcatgtctctgaacttcagtttctttatctgaaaaattagagcatgaaaataaataaagaaaagttcttagagactataatgtactcaagtataaaatatggaatagccaaccaagaaaactatttggaaatatttcttgcaagatgcctacagcctaagatgtagaattcttcaaatgcattaaatgcttttaaaaatattgtttatagaatttatttttcaagttatgttcttctggtgtacaaaatatcccctccactgtctctaaaaaccttataaaaatacagttttttacagtttatagttaaacatgtgagtacgtgtgtgtgtgtgcgtgtgtgtgagacaacagtgtaaaaaagatggatttttctctttggattatgaacttcctcagtagataatttcaaagggagtgatttgtcaaaagactccagcagtgtcaccaaaatcagaaaatagttctttaaggtcatcatattaaaggccaagaatcatttacatgtagaaatcctgctgagtttgctaaaagtttgtctttgtttcacagtcacaagttgtatttctattcttccattttcttgcaagagaaaacactttaagtcacacctggcactgagctaacaccataagcaggctagctacatgatgatatttgaaacaaatttaaaattcacttaatgaactcaattattgtgtcagcttataaattttcacaccattcctaacattttcttgtcatttttttctgtcttgagaatgaggtatctgcagtggatactgaatcatcaatatcttctgcatggaactgtatctagtttcttcattgtactcacctatatagatgcaacacagaaaaagctcattgatacatagttcataatttgtaatagtgactctaagatagctttagtgtgggacagtctcagaataatattttgaatgaagcaaaagattatatactagagaaccaccaatgtatgagttaggactggtttccacctttccatggactatggtgacttaagcaaacatgcacttatttctacaaaacaataagttcagaagtacgtggtccgatttaagccttcttgtttgtcatgttaaactgtgacttattttctcatgctcaaaaatggctactgtatctttaggggaagaaaagagaatggaaagaagcagtgtctgacccactccactttaacattgcattaaaattttttttttcaaagttcaatggactccagttacactctaatatattcagtatatgtgtggtggcttgtcatgtactcaattacatgtcatatacccaagatcaaagacttactccatattcttcattgtttagctcctatcccatacagagagtaccacatatgatttatttttttctcattttagatttgaagtcattctgactcagggatatattaaaatgactgatacatcctaattaattttgagtatgtgtggcttgaattattgggacattgaatgctaaccacttgataaacagtcttgaagcttttgcacttggagccaaattactttgatctgattgagagcatgaaacagtccatattaggttttattatttctaggccattgcttcagtgtgagaaatccacatatcattctcactaccagaagctccatgtatcagtaatgccaagaatggaaatcctctcaatggtggtaccaagcctaagcacgatctttgtgtcagatgaactttgagatgctcatgatttcttccaaataatagtgtacatgtttatgtagtcagagaatcctccagtttcattcccctttatatatttttaatagagtctatttcaatatattgcaatataaaagttttctcttttctttctttttaacctatatcctacaatctagcacaagcccggaacatagtcaaaaataaatgttgaatgaacgaatgactttgcgccagtttctaagcctctgtaaactataatgtcctcattagtaagcatatatgtcaaaatgcttagcaatctggggtaataaaatgcattaacttggaatcagtttgcgtcccagatccacaatttatcatcttttagaaacttcaaaattaacttttaaattaatacatgcattcattcattaatttaactccatcgactgctctaaacactggaaacacataagtggaaaaaatgttttctagtagctcatagttcagtgtaagagacagagaccagtgcatgataaatgctctatttctttaccttcaggtgggttagtaatgcctgcttcccagatttgtatggactcagtacacaggaatccatgcctactctgccttaaaatatgcaaaaaagcacttttgaaatgttaaaatgatttgctaaattattttaacaacttttttgaaatgtgaaaatggtctgaatcactattttctcataaaacagggctagtaccatgcttgttgcataagagagaggctaattcattatatgcaaaggttacctgtgttgggagtcccacatacccgctcggtgagggtatttggatgaggattcacaagtcatatccatgactattggctatttgaatcagagcaactccatcctaaataggaactgggtaaaaataaggctgaaacctactgggcttcattcccagatggttagggcatttgaagtcactagataagacaggaggtcagcacaagatacaggtcgtaaagaacttgctcatcaaacaggttgcagtaaagaagccagctaaaacctaccaaaaccaagatggcgatgagaatgaccaaatgccatgacgacatcaggaagttgccctatgttctaaaaacaagaagcatgaataatccacctcttgtttagcatataatcaagaaataaccataaaaatgggaaaccggcagccctcaggggctgctctgtctatagagtagcgattcttttatttctctactttcctagtgaacttgctttcacattactctatggacttgccctgaattctttcttgggcaacatccaagaaccctctcttggggtctggattgggacccctttcccgtagcactaggacttattacatgcctatgatttattacatggttacaatttattattacgtggcaggaggacacaaaacaaaatcagcaaaggaaaaaggcacatggggcgaagttcagaggaaacagttaagcacagacttccaataactctttccgagtggagtcacataggactcacttaattctaccagcaacaaattgttacaacaccttgaaatgttgttcctgataaaagctcattagagacaaagtgcccaaagttgtttttggggcctggtcacataggtgctctctgcccaagatttgagactccgagaaggaaatcaggtgttcagtatcaattatattttttatacaaacatattttttatacacagcaaattacccttatcagacagcaaataaagtgaatcctcctgaaatccaggttcccaaatgccagacaatggtcaaccttgcaagcagtcctatctgtttagctgtttcaggcctgctctgttaaggctcttctacacaacgcctaagggcatttgattgaaaaagacacctggcctcttggggtctttgcaatgcttgctaaaggaaagtttgacaggtgagaggtgcaggaatagaatgcaactttttatcccctccccttctctgggcaaaaacaggtgaaagattggacaatagattaactatgtcatctgcttgcccacctttctgattttgctgcttatcacagtattcatcagagatagaacagaggtgattttaaaactctagtacattgcaagacaccttcagctgcattcatgaagagtgctgtttatattgtgtttctgtgctttgcatgtactagagcttacaatttaaaatcaaccactgcagaactctttggtaaagtgagaaatccatttataaggttcatttcttaagtcattcatcctgtaagttcagaattgaatgttttgagattctttaaggcacacttgtggggcactggagctttttacagctgagtttccacatgagtcactccaacatactgaactgcctggacattactgaatttagaaaagcttctcttggatttcttgttactatatggtatttgtgctttcaacttagtttctcttgctcaaatatttagtttttgaacactggatataattgcacagccaaaaataaatttttacacctctctaaacaaagcaagaaactgtaaaatccacaattagtatcatgaaatcttattgtaattttctttctttctttctgttctttttttgagatggagtctcgagtctcgctctatcgcccaggctggagtgcaggtgtgatctcggctcactgcaacctccgcctcctgggttcaagtgattcttcctacttagcctccggagtagctgaaactacaggtccatgtcaccacacctggctaatttttgtatttttagtagagacagggttttaccatattggccaggctggtcttgaactcttgaactcgtgatctgcccaccttggcctcccaaagtcctgggattacaggcatgagccaccgtgccctgcccttattgtagttttctgaagatattcttgctggtgttattttaggaatgtggctaaatggcctttatctgagaaagtgagttattattttagggagtggcaaaagaaaaagaagtgtgtgggaataaaatgtttaaattgctgttttcttagcagctataatagtgcatgcagctgccaggactacaatatttagaaaattcaaggatatttatctctaccttaaaatattttgaagactatactcgcttacatttgcagttctttgaaatgtgataatggttgatcaaaagtaaaaagatattttcttgattcaacattaatcctttcctggagtaactttacccccaaaaaattaaaataaaaggcaaaaaatatttttttcttgctagaattttaaattctggagtaagatttgagactgaattctaactgttttcagtatgtggtacagtttaaattaaaatatgtgtcgggtttagtcataatgtccttataccatttatgttgtattcaactgaatagtaacactgtcatcataaatgctacatttatctagattttttaagtgtatttttagagccagacaacaatgcaacagcatctatcccactatttttgtctaagcactgctatattaaaaagcttattgtttctagggcttgttaatcttgaagacatgatttatttctatgggactaatttattcaattcgagcagggatgatagaaaatactagaataaaagcaaattactttatggatatgtgcctgtgtgtgtaattggacacaaagaacaattagaggcataaaaatgttcaaataaatgcattttttcagagtatgaaaaatatatggcatttttaatgtcacctataaaactacgtataatctataaattatattatccttattgggactattcattgatcatctaaacagaccaatacaaattttctaagatagtttctttttttttttgtattttattcttcctattctaccttgatttaccaagatatgaaactacaaatcaataacatggggaacttggaaaatccacaaatacatgaaaattaaaccacatgctcctgaatgaccaataaattaaagaaaaactcaaaagggaagttaaaaaatattttgaaacaaatgacaacacaacatatcaaaatctatgggatgcagcaaaaacagttctaggataaaggtttataacaataaatgcctacattaaaaaagaaggtagattccaaacaaatagcctaacattatgcctcaagaaactaaaaaaaagaagagcaaactaaacccaaagttagtggaaaaaagaaaataataaagactagaatgaaataaaagggagcagaaaaaccatttaaaaatagtaaaaccaagaattagttgtatggataggtaaacaaaattcacaaactcctaactacctaaggaaaaagactcaaataaataaaatcagaaataaaagtagaaatattgcaatggaaacttcagaagtaaaaatgattataacgggctattataaacaattatgtgcaatatttaatcaggaagaaatagaaagcttgaatggaccaataaaaattaagagattgaaatatgaattcaaaactttgcaacaaagaaaagcccaggacgagatggcttcatgaatgaattctactaaacattcaaagaagtattaccaatatttaaattctcccaacaaatagagatagaagaaatacctgcaaacacattttacaaggcaagcatcaccttgatccctaagccaatgacatcacaaaaaagaaaactataggccaatatctctgatgaacattgatggaaaaattctcaataaaatattagcaaacaaaattcaacatcacatcaaaaagattatacatcatgaccaataggatttatccctagcatgcaaggctggtttaacatacacgaatgaaacaatgtgacacatcacattaacaggatgaaagataaaaaacacagaattttctcaatcaacacagaaaaagcatttgacaaagttcagcatcctttcctgataaaaactcttaacagtttatgtatagaaagaaaatttctcaacataatataataaaggtgatttatgaaaaatccacagctaacataataatcagtgggaaacagttgaaagctttttcactaagatccagtgcaaagcacaaatgcccacttttgctacttctattccacataatattggaagtactagcaatagcaatcagaccagagaaagaaataaaaagcatttaagtcagaaagaagaaaaagtaaaattatctctatttgcagatgatataatcccttatgtagaaaaccctaaagattccacaaaaaactgacagaatgaattaattcagtaaacttgcaggatacaaaatcaacatacaaaaatcagtagcatttttatacactaataacaacatatctgaaaaagacgctttaaaatcccatttatgaaagcataaaaatagttagaaataaatttaaccataaaggtgaaatatttgtataccgataactataaacctttgataaaaaaagttgaagaagacacatataaatagaataatattctgtgttcatgaatcaaaaaatttaacaatgttaaaatgtctgtattaaccaaagcaatatacaaattcaatgcaatttctatcaaaatttcaaggatatgcatcacagaaatagaaaaaaaattcttgaaattcatatggaaccacagacacataaaaacagaataggcaaaggaacaatgagaaagcaaaacaaagcttgaggcatcacacttcctaagttaaaattatattgcaaagctacagtaatcaaaaacagtatacaaatggcatgaaaacgaaaatgtggaccaacggaacagaatatagagagccagaaacttaactaattttcaacaagggtaccaacaggacaccctgaagtaaagatagtttcttcaataaatgattctgggaaaattggattgcaacatgcagaagaatgaaattggaccctaatcttgcaccatatacaaaaatggactcaaaatagataggagacctaaatgtaagatgtgaaaccataaaactcctagagaagaacatagggggaaaaattccttgatattggccttggagatgatttttggatatcacaccaaaagcttaggctacagaatcgaaaataaataaatggaactacatcaaactacaaagtgtctgcacagtaaaggaatcaatcaaccaaataaaaaggcaacatacagactgggaaatatattttcacacagcatatctcctaagaggctaatattcaacatttgtaaagaacacttacaaatgagtaacagaaacaacaaacagcttgattaaaaacaggcaagggacctgaacatacttttctccaaaggagaaataatggctaacaggatatgaaaaggtatacaacattgctaatcattagggaaacacaaatgaaaaccactatgagatatcacccttcacccattaggatggctattataaaaaaaaaaaaagacaagaggttactgctggtgagagtgtggggaaaagggaaatacagtacactgttggcgggaatttagatttgtgtagtcattatggaaaacagtgtggaggttcctaaagaaattaaaaaatagaccagcaatgacccaacaataccttttttggggattgacccagcaattcctcttttgagtaggtaaccaaagatgataaaaatcatcaccttgtaaagatatctgcactcccatgctcattgcatctattcacaatagtcaacatatggaaacaacctaagagtcaggttgacagatgaatgtataaagacaatgtggtacacacacacacacacacacagacacacacacacacaaacatacactgaatattcttcagccataaaaaaaggtgatcctgccatttgccatgacatggaggcatgggtatacctgaaaaatattatgctaaatgaaataagccagatagtaagaaaaatagagtcatgtatcatttaacaacaaggatatgttccgaaaaacgcaacatcatttgctgattttgtcatcatgtgaacaacacagagtggacttacacaagccgaaatggtatatactactacacaactagtctatgtggtatagcctattgctcccaggacacaaacctgaacagtgtattactgtactgtactgaatactgcacacaattgtaacacaatgggaagtatttgtgcatgtaaacttatctaaaaatagaaaatgtatggtaaaaatgtggtattataatcttatgggactaccatcatatatgtagtttatcattgattgaaacatcattatggggctcatgactgtactacatgatttcacttaatgtagaatcttaaaaaagaaggtcaaatatgcagagatagacaataagtggttcccagggatggtgggtgggggaaaaaatgagatgaaggtcaaagtatatgaagtagcagatatataggatgaacaggtctagaggtctaatgtacaacagaagatgataatagtctataagagtctaatattgtagactataatagtctataacagtctaatattgtagactataatagtctataacagtctaatattgtagactataatagtctataacagtctaatattgtagactataatagtctataacagtctaatattgtagacaataatagtctataacagtctaatattgtagactataatagtctataacagtctaatattgtagactataatagtctataacagtctaatattgtagactataatagtctataacagtctaatattgtagactataatagtctataagagtctaatattgtagactataatagtctataagagtctaatattgtagactataatagtctataacagtctaatattgtagactataatagtctataacagtctaatattgtagactataatagtctataacagtctaatattgtagactataatagtctataacagtctaatattgtagactataatagtctataacagtctaatattgtagactataatagtctataacagtctaatattgtagactataatagtctataacagtctaatattgtagactataatagtctataatagtctaatattgtagactataatagtcttctgtattaggttaaggctttttgttaaataagtagattttaactgccttttccccaacccccacccaaagataactatgcgagatgatagatacgttaatttgattcaccatagtaaccattttactatctgtagtttttccataacttgtaaacctcagatatacacaaggaaatttatttttaaaaagtgtacttgtcaaaatatgcttaaatacagattcaactttcagtttttaaagattttaacataaataatttttaactattttgctataatatacattaatataaagaaacaaatgagaaaaaaattgtcaggccattatatagttcacttatatgacaaaatgaagggtttcctttcaaaattatgtgtttgcatcactggaatttagagaaatcctcatagcttaagtattggaactattgtttataaaaatgcagagtagaagaccaggcacagtggctcacacctgcaatcccagcactttgggaggctgaggtaggtggatcacctgaggtcaggagttcaagaccagcctggccaacatagagaaacctgtctccactaaaaatatgaaaattagcaaggcatgatggcaggtgactgtaatcctagctacttcgaggctgagacaggaaaatcacctaaacctggaaggcagaggttgcagtgagctgagatcatgccattgcactccagcctgggtgacagaatgagactctgtctcaaaagaaaaaaaatataaaaaaataaaaatacagagtataaacaagctaattgtaccagtgtttatgaaatgtctagtaaacatataagttgttaaataaaatttcctattttagtcatggatgcatacaagtaaatagatatttataacataatctgataagtaaatgttctaagttaatgagaatactgtggaaatccatagagtagcacctaaatctaccaatagaaggtgttaaatttatgaaggctttccaaaggggtaatacagaagttggactatcattacatggtttcacatatatcacactttaatttgtgattatccacaatttcttatattttaaaacaatttcaaagtaaaatctggcatactcagcattagtaaatgttcaaaatattagtccaaacaattgttactttaagctaaaattatatggatttgactcttcatttccttcttttgccataactttagataccacgtctagctgaaaaagaaaaaaaaaaaaagaaagaaatttagccagtactgaattgaaattacttcataatgttcacaagtagggtggctacccgttctggtttattcagggtctcttggcattttatcaaacttccatgtactggaaaaaccctaagttccagcaaaatggatggttggccattctacccattggctcttctcaatcaatgtgatatatttccacacttctatttgcatgtgtgcattgaagtgaaaaaaggttttggtaaagttatgtcacctcaaggatcagaagcaggtactttattcaagtaagtatgaaagcatgcacaaaaaagatatttcctatataaatagcaaaaattatagaaggcaaatctaggagtgatgctataattgatgtgaacttttaaagtgaaactgaagttcataaaataattttacttggatttcttgtcctccaacttcctcctgtccatgtttttctgcctcataaacacacgtacccacatattcagtcagctcctcctatattttatcaaaacaaaacaatatgttctttaacccaatgtcatgtagcatggtggccacctcacctatgaatttctctcttaaagtttaataagacattctatatctattatcaatttactagatcattccacatcatgtgccactggagactattcttccttgaatttctcccctctcttgatttattgacacaataccctcccagttttcctctttcaaatccttggcaactttttgcctatctgtttttgggcttcccttatttcactcacccttaaatttaaatatttatattcctgagagttttgtcattgatttgcttctctctttaatccacacactatgcaagcattgcagatacaacagtggatttttctaaaaagataaaaatttctatcatcatggagcttaagttctagtgaggagaaataaacaaaaaataagtaaaaaatataaacagtttatcatatggctctaagtgctatgtagaaaaataaagcaaggaaggaggctgtattatactcatagagctgccttgacaaatgaccattctcttggctatttaaaacaactgcaatttattctctcacagccctggaggctggaagtctgaaatcaaggtgtcagcagggacgtacttcctttaaaagctctaagggaaaattattctttgcctcttcatcttctagtgactccaggcatttcctgactttaagcaacatcactccagtctctgcctccatcttcacatggccttcattcctgtgtatgtccacctttccatgtctccatgtctccaaatgtcccttgaggacacagtcattggatttaaaacccaaccaaatccaatatgacttcatcttaacttgattgcacctaaagagactctatttccaaaaaaggtcatactcatagggtctggatgaacatacatttttgagatacactattccactaactagagagactgaaaaatgcttgttgcagtgattgatggggaagatgaggaagtcagtggggtatctctaaccaaatagctcataggcatttcaaactcaacatgtccaaaattgatgtcatcatgacagtctcttaaaaccagcttccaagcgcttgccaaatgctgttccttggctagaaacatggggataatcttagatactcaaactgtctccatttcccaacaaactcgaaaccctgtcaatcctacctcttagaaatgtatcaagatatctccatacctaattctactacctctctctaggccattcttatttctgtccaagttttccaccccaattctctacactgccttaaaggaaacttctaacaagaataatagtatcatgtcacctctttgtaaaatatcctataataactctccaatatttgatataaaatatggtttcccttacaagtaaacagaaattccacccagtttttcttagcagatgcaactaaagaagctctaatgactcaaaagtctttttctgtggcttccataaacatttttcatcctgtaccaaccaataatctcagttcttctcctactacatctatccaaacttcctcaaaccagctatactcaaccagcttctactttctagccagtttcagctgccatcatcatcactccctcctcttcatgagcatcaacaatgtatctgatagtgtttaggcactttgtgaatgtaatttttaattcacttaacaatcctaatgatagaggtcttgtgattcccaggttatacatgaaaaaactggaacacaagagcttaagtttctttcctgcaggattcttaatcatatgaaagatacagttttttttttaacttacaaattggagttaacagtatctactctattgaactgttattcaaaggattaatttaacaaggatcactacactttataatcttttcatagaagacaaagtggtggtgaaagcaaaggggctgtctgtcataaagttggtcctgagcctataacaggattaaagaactgcagtttccatcctggcagaccttcagcccttagactcagtggggactacctaacacaaccatagtatagaaaacgggttcatttattcatttagcaaacatttattccggatctttcatgtaccaggtactaagattaaaagatatgttttttttttctaaaataaggccccgtcctaaagatttcatcatgcatacaggtacattgctatattactctatttataaagcaataataactttactccttctacaagtactgaatatttactctgagtccagtaccctagtaggtattaaaaaaaattccaaaattctaatctaccagggagaggtttacaatgtccatactcagactgtacaatactctccatatcctatgagtcttcactcatcccttcattctcctgtattatttgcatatgtctgtatcctgagctcatccacaagcaacaggatggaaaaaagcgtgcttcttgtttatttttcaatccctcaccatgtcccacagagcacaaagtaaaatagaataaaatttagccaaaggctggtacctgaaaaatggctagcaataaaaccacagttattaaagacagagtgcaggttgcaaaatgaataatagttactctgcgcatctgccctgtggctactctgggccctcagaactgtctagggcatgatctcaagcaggtagatcagtgtgctgatctgttggctgaaggaaaaaagcgtaacgttcttggtgtccgttctactctccagtacaggtttggcattatgaaaggaaagaagaggggtagaagcctccttaggaaaaagagctggcttttggtgctgaaacacctgcctagagtgtttgaccactgctgtgacttgtagcaaaggtctttatttagtgctgcataatctcataaacacatacttagggcatgagcaaaaggtgcccccaaggagtcttttttttttttttttttttttttttttttgagacagagttttgctctgttgcccaggctggagtacagttgcacgatcttggctcactgcaagctccacctcccaggttcatgccattctcctgcctcagcctcccaaatagctgggactataggcgcccgtcaccatgcccggctagttttttgtatttttagtagagacggggtttcaccatgttagccaggatggtctcgatctcctgacctagtgatccacccgcctcggcctcctaaagggctgggattacaggcgtgagccaccgtgcctggcccccaaggagtcttttgaaagcttttgatatttgatactggaagaaaaaatgtgatcataggaaaatcagaaggtcatatgaaatttttgtctttatcattaaaactgtttctcatcacataagaagaaagcaccaaaacctcttcaagttttaagacttgaaaaagttttcacatggcccaactttaagtaaaaattagagtctgctttggatgaagctacctcttccacactcggtcagactcttccttatttacagcccagctataagtctgtccagggcatttcagaaataagtaattaggccataattatttatgcaaatttataaagcctagtcataggtttaactttctttcttcaattctcatgtttaactataatggttattttacagagaaataattctattttttcccttgaaagtactatacaatgactttagagattctagaataggtgactctatcttgtttagtcattatcaattttaaattacaaccaaagaaacagccaagcaaacatgaacagggtttctcataaatatacatctttaagtttcaaagagacagagctaatgaaactgtcactttgaatgctaaatggagctcttgatgtgcttacgttgaatcttctctagattttctcatacacgaaattttgctagtttttttttttttttcagcatcagttcaccactcaattaaaggttggtgcagaatcaggagaagccaaggcaaagaggagcccagaaaagctcttgtaaacacaagagcttttggtattggctgactcagagaccagctatatttcatgaagacaaaaccagtccagccagggtcctatgactgtgcttgtcacctcttaataacctgggtcaccactgatccattttaccagtctccatcactgctctgtgttgatgactagcatccttgatcagctgaagcatcaaaatgatcgggctttaagtcagaatatttaagagcaggtatttccagtcatgtctcttacgtgtactgttgttggtcattgagcataaaactggtccttcccactctttgattacataactgcctctaaactgcctagactgagcccctcacagcttcacaaacttctccaatgcctccctatcaaaccctttccattgacatttctgaggcctacattttatcataaaaatgaaaacaaagaaacaacacctcttacatattctccaattgtatagaacaatctttctattgcttatttttactgacacatggcttagtccagtcccaaataaaagacacacatgcctctgaagactcctgtcctgagagctatacttcaacctctttatcctgaacttcacatagaaatttttgaaatattattttatgcttacttctatttctcatttctcattcactatgcagccaactaaaaatgattttaccctttatcactctagcaaacagtctttgatacacatatctatgatcacctaattttcaaattcagtgactcatttttcacatttttttttattggactgttctgttgcattagacactgtggaaattctgaaatctctaagctttcctgatgttgctctaaatctctcaccattccttcctacccttcctcacctttaaatgtagatttgattcattatatcatccttgatctcactccataggtttcctggagctattgcttcccaactctacattcctatttgctatctccttgctgaaacttgctcatctcagcttgcttggctgattcttccagatttccgatgcttccctcattgctagatgttaaactttcagcccataatctttttattaatttattatttatttatttattttttgagatggagtctctatcgccaggctggagtgcagtggtgcaatcccagctcactgcaacctctgcctcccaggttcaagcgattctcctgcctcagtctcctgagtatctgggattacaggcatataccaccatacccagctaatttttgtatttttagtagagacagggtttcatcatgtaggccaggatggtctcgatttcttggcctcatgatccgcccgcctcagcctcctaaagtgctgggattacaggtatgagccaccacgcctggcctcagcccatgatcttttacactaaacagcacatacatctgtgcttcttatctgaattgactataccactttcttacccagtcacccacactggaagcatcttggaccatccgcaaccaggctttcaacaaatcaccaaatactgcaaattttagctttaaaatatgtatagaatctgatgttttccacttcatccaaagaccagtatcctggtccaagcttttagcaatgtctgaactcctgaaatagcacctaacttagttctcaaccttgagccttattcttctcatatgtaaactcctaagcaatgctctacgaagatacaaaaatgactacgtcattccactcctagacttatttcttacaactgcctgacttgtactttatgtagatctctcaatccatcaaccatttcgcaatgatgtgcctctggttttgtggtggtcttctccacctaggatgcctttctgttacttctacttgcaatcagctcttcttcatctgtccattaaggcacagcccagtcaacatttcttctaggaaggctccctgaccttcccttcttgcattagatgcaatttctcagtcgttctaaaatgagtaattattatagctgtcacttaactattttgtatttatttgatcttatgtctgtctcctcaacagcctttgagttcttcgaggaagatggctgtatctcatttatctaagtagtgtcagcatatgcaagttgctggacacaaaatagtcaataaaactcttaaattgacaacttaggaagtgatccaattttaattttctttcgttcatgaaaagtagggataaactgtgtttttcatgttcagagattgatgaaattcatgggatatttctgaagatctttaaacattcagcatataaaaattatgaaatacatttcttgtgtagtaatttcctataagggatattctgactgttggctctttcttcagaaactaaaatttcttagaaaataacttatttggattatcatctaattcagactttctttcaagcagaaattttatccaggctacaactattgatccagataattattcttatcattacttcttgtatcagtctttgaactacctttgtccatgttgttctgcttctagcaaagactaattaattagtagaggagaacatgaacatcagctgaaccgctgctgtaagaaggtagagaaagactgtggagaaaatatgggctcagagatagacacactggattccagtctcaaccatttaatgcctgagtgacaatgagcacatttctcagccactcttggcccatttcatgtttttcaaaatgtgaataacagtgttactcggtataattattttgagacgacatgagttaatgcttttaaaatacctggcacaataatttgaattcccctttccccatgagagttgacatgcacctactggataggaaagcctaaaagaactaaacacatgtttcagtatttaactatttgcatgctctctaatttctattcacatgtataatgacaacaggtcttctcaaaagatgatttctcagtaaaataaaattaaggcaagaatgacatgaaataatttttccaacgttagtagtgaacttatttctgctttacttgactggttgccaaagtttttccttgactatatgaaagaaattgggtaaacttttcttaattggcaaaacaaatccactccgaagtaaaagttacgaaacagatgttttctgcttcttaatagaaaagctagtacagaaaggaagttccaaatggaacattctggtggtgccaaaggaacggagaaagaaggacaaaagaagaacttttaaaggtagaaattctcattatgatgattgattatttaaacaaggttaatttttcgaggcttatgaacctggtaaatttaagacggcaaacaacaaaatgctactgctaattagacatccaatgaaatgccatacagaaaggttaactattttaaaaaatgttatgtaatcttctatttcaaatgtcattgttattagttttgtaatagagctcactgacaaaacagacatgaatatatcttccagagagtgaggaggaaatattttattagttgtccagtatatagagaaatgagaaaaatattacaataaattttcatccttcatttgaaatattcacatttaatcatttctgtaggaccggagttattttgctttgggcagacctgaccctaggcagatttgaaaacaacaccacaatatatgcattgagggcctactatgtgctaagcactgaggaaataacagtgaacaaaacaggttaaggtttctggccccacggagggattctagtaggggaggacttgaaatagggaaattgtagtgtaatgtgatgtccagtagtaacaaacactaggaagaaagaccgtttagagattgttattttcctgaccacccagcatagcaataatggaaacgtttggctggggttccctcaatgcattccctggccactgctgcaatgagtgagagattaagtgagtgtgaggagaagaattacatggtgagcactggataatttccccatcttaaccaacctgtaaggcagcctgaaccatctccatcctccagataaaacagctaggatttaggaaactgaaggaactcagcccaggtctctcagctagtaaactgttaatgcagtttctctgacccaaagtctgtgcaaatagaacatctccaaggatgcagaggcagtgaatcacagaagtagctgcattgcttctcctttaaggtgtgaataataagcaccaggtggtttgtgcgtattatcttctttggtccccaccacacaactatgacgtagggccattattatccacagtgctcagataaggaaactgacactgagggagggttaaataatttgttcaaagtgatggtaggtctataatacaaactaatctctgctatttccttcttttatttttatttttatttttatttttgagacagagttttgctcttgttgcccaggctggagtccaatggcacgatcttggctcactgcaacctccgcctcccgggttcaagcaattctcctgcctcagcctcctgagtagctgggattacaggcgcacaccaccatgcccagctaatttttgtatttttagtagagacggggtttcaccatgttggccaggctggtctcaaactcctgacctcaggtgatccacctgcctcggcctctcaaagtgctgggattacaggtgtgagccaccgtgcccagcctctgctatttcattctaaggagcttatgtacttttccttgaggttgttgacttcaaccatgaatcaagatcaatatgtttgattaagaatgcattgatcaaaataaggaaatcccagagtacagctgcagaatgtataaatgcaggcattgcatttttttattcaacctataattatttatgttgacatttattactacatatctttaaaaatataaccaactgaatttggtgaggaattcagtgatgctataatggtctctgttcttctgaagatgtgtggctgccaggatagtggtttgtggagcatcagctacaaatgctcttagaaagcagcagtgtgcatgccaaccagtttatagcctataagactgtattctcttcttatgaaggttgagcatctattaatagctgaagctaccatttgtggcagaggcaatattttaatgcttaagagctgggtttcaaatccttgctctgcaatttactacaaattacttgctgcccactgaagctttttgttaaatgctcattatattgctgaatgcttattatgggccagggactattctgtgcactttaaatttaatcctcctaataatcccaggatggatggctaaccccattttatggaggaggaaactgagctcagagaggaaaaatgaatcatgaatggctgtacaattaataaactgccaagctggttttgaaccccaggtgtctctaatagtttcctccactacatgacactgcaggaccaatgagaaacagtattgagactatataagaaacagagtcagctttgtaatcagggctaagcatttagatcccatactagctcaacaaggcactgtttctccagttctgtcaaattattgacaattttgatttgtagtccaatctagaataaaatgtgcaagggacatattattgagagcacaaggaagactatgaatgtcagagagaagaatggaaaggttgattctgagagtctaaaatagggaatgggttagctaggttaatcaaggtaatcacaggaggccttgaccagttgctctacctaaaactcagtttccttcagcttctgtaaagtagaaataatcatacctagttcattgggtgattatgatcaaaagtgtgaaaataagaccagcccctagctccattcctgtgcatgcacacattgaccatagatagccctcaactcaaccccacgttgatcatgctccatttttctcagctgcagtgcccctgaaagggaatctctggccaccatgagtgatctggaggagcagtttcatgtctatgctgagggtgatttccatccatgacatggtcatgagaaggacaacagagacaccttgaaagggactggagttgcatttccatagaccaaagactaatgagccactatccctttcactcaaggtgactactgagcaatcagctatgattacacacccctccatgactgaggattctgatcctaacaaggcataatggaaaattcacttgtgcttcacttcacacatgatgaaaaactaaaatacaatgattggttttctctttgtcagccagatgggttcttcctaaatgcaaatccacagaggctgccccactgtgatgaggctctgcactcatcatggcagagacaaagaaggtttgcgggtttgcctggcagcttgcccgaggctttgcatcggctttgggaaaaccagaggcctatctaagcctcaggctatccatctgctgccaggtagccctccctctgccttcatcctaaataaatctgttttggaggagccaggaagctttggggacaagatctattcactaactcatatgtaaaaatgccacctacatctggcaaattcaaatttctgttttctgagcacgtgtttatacttatttattgcctctcttaggtacagttagatctccatgaaccagttcaatcagacttaataacttccccaatgatcctagccaaaataagaatgtacctgggaagagaatcttagcctcagaactgcagttcagaagagcagctcttcttgaattctaccacatgcctttgaatctcaggagatctgggccatcaaaagtccatttggttccaatgtctcactctccagagtgtggttgatgaaccagcagcttggacatcctttgggagctgtgactaattcttaaaaatgcagaatagcaggtcctacccagacctactgattcagggcagcaatctaacaagaatccaggtgacttgtgaacacactgaagtttgcaaagtactggtttggaggtcattcaaccatcttattttccagagagggacactgccaagtgactttccagaacatcccacagcagggtccatttagaattccaggactcgaattcagttgtgttggcaagaacatttagccctatcttgaaatcttctgggcctttgtttccgtaacactaaaatggggacattcacaactgccttgcttccttgttggtatacaatgtcataatatatatgaaagcattttatttcaaagccttatgcaaacaaatatgtctactgttatatccaaccaaactcacttgaatcttaaaagatgtgtacgtgtgtgagtgtgtgtgtgagcaggagttctaggtatagaactgggccatatatgacaaattttgccctactttagaatgtaacctaattctcagactgcttgccaaaaaaaaagaatcctttctcctctaactctcaaaacggttcttaaaatagatgggccccccagggactccccgacatgtttccactgttagagttcaggcagcctgagatcaacgggttttatttcagatgatgttcgatttggggacatgagctcaggaggacacgtaacaggttagaggtgagcagccctttgtatttttaactttaaatcatggcagtcgctcaaatcaactatagtttagtagacaaagggaatgagaaagataaatataaggactgagagaagagaaagaggataaacgtaaggagaaggctgctgttgatagtatccactcattaaaaaaatactgagaagtttatatatgtcagacactgctctaagtattttggacacggtcatgaacaagaccagcaagggtcctcactgtgtatggcttatgttctggtggtggtgggtaggaggacaaattgaaaagcaaacatatgtccaggaaaacttggggtaggaaaacatgctttgagaaacctagctactgcacaggttctgcctatggttggatagccagagtgactactctgagatggaaattcaaatgaaaccttaaggagaagaagccatgtgtagataagggggaagagcttcccaggcaatgtgaatgctccgaggtgagaatgagctggggagtttcgagaaacagagagaaggcctgagtggtcagatggtggtgagcaaatgcagaagacgagttagcaaggttgagctaggttggatcatgcagggcctgtgtgtacacttaggaatgcggacacctgtctgagtgcagtggaacgtcattgctagctcaactagtgatccactgagatgtagaaattggaatcttggaatctcagcacgcagcacaggttaatagactgaaagcaggaaaatggaagtgtattttctcattcttctttctgtccttgatcttttcctcccttcaggtttttatcaaattcttattatgtgtcaggcaccgtgtcttagtgagcaatggactaaccttcttatgaagttaaaatacattcattggtgtgagttagtacaggatacctattccaatctaataaaatgcaggcccctaatgaaatggggtcctaatctgtgggcccccattgccaacagcagtggctcttaattgcagattgttacagtgaagaccttgttgcatgcaaaaatactaggattccattcagatgtattgaataagaatctttgaggatgagcctgcctatatgtatttttagtatactgcataagtgatgctgccagctgtgaacgtcctcttcttgagcctctctctggcatacctggcataccttctttgctcccctaagctccccttagtcttgagggatcagtgcaaagtctgtttcctctgttatcatcactctaacttacgtgactttgcctgatattcctagtttttgatgttttttagttttagttttagttttgagatggattctcactctgctgtccagggtggagtgcagtggtgccatctcggctcaccacaacctccgcctcccagcttcaagtgatcctcccacctcagccttctgagtagctgggattacagacatgcaccaacactctcggctaatttttgtacttttagtagagatagggtttcaccatgttgcccaggctggtctcaaactcctgccctcatgtggtccacctgcctcggcctcccaaagtgctgggattacaggcatgagccaccacacctggctgatattcctagttgttaagccctcaccaatcactcgttctcagctagaggtaagctccttgaggacttgagctgattccttttcatttcatcctcctagtacttagcctactttacatgaatttttaatatgcaaatgattattgccgctgattaaaataacctaaatacagagaagcctgaaagtgtaaggaagctccttaactttattttggttccttctgagataaggagaatgaatcataacaacaacaacaacagtcaacactgacgttgaaattgttaatatgtactgaacacttaccacatgcacatactgggctaactacacacggcagctcctaatctgttattcctcatttacatccctacatgcagttccctgcatgtgaccctaagaggaccagcttggtgggaaatgttctcagtaaacttggatcccagttccaactcatcactgattaatggtatggtccctttcaatctctctgagcctcagtttacacatgtggaaaatgagatggtaaactcttgccttttctcttttccagggttgccatggaaagccaacgaggggatacagtcagtgctgtgaaaacacatgttaaatgaagaagaagaaagataactcctgcttctgaggcaacaccagaattccagaagcagcagaccattgacttttctgctccagatttggaccttattcatttgcaatatttccaagttgctggttaaatctgaacttatctaagaaacaggtagtaagtgaaagagaatgtgagtcaatataatattggatgcctgaaaagtgcagcaaagcaaaatttaataagtattgacccaaatctttcatttctagttcaatttgacaataacctttatttttcaattaattcagccagagtttccctgagtcaaataccaggctggactttgcaggacctagagctcagccattgcctctgctcctatctttccagccagctttgagggggctcttatccgggagaggagagatattacccaccacatgtggttggagggagcatcttcgttacactcctgcagcatgctggctgccagcaaatggcctcacattctgtgggaaacaggctttctgcctggtgcagctttgcttaagcacaccgttcaggacgtggcctgggagtctcccaaggaatgggccagtatcatttgaatggagtcaataaaacctgttagtcaccttatcaacaatatcagaatcactgttgttcaaaaactgtattattggagatgactccctttgttttgttttctcctattattaaaaaaatgataatggtcctatccccaagaatggtaatatataacatattaatatcatgttatatgttattaccatataccatgtataccaatgtttaccaattggttcctttttctcacaagaaggaacttatgggcctttacagaatacatttcaagccatgtgtaagaacctttcactgcaccatttaatggaatccctgccaccccttttgtatggctggaactgaaagtcaaggatagggagtaactccctataggtcacaccattggcaagtggccgtgattttttgagcacatgatttcatataaatgtggcctttctcctgctattcctcacagctcttctgaataagtgagagtacggtaacagcgactgctcgcatgagagggagaggctgagatttaggccactttgaaaaaaatcctttgcaaatactgacgcatagtcacaatgttttctgtagcatcttgaaactcttgaataaaatgtattatgcttgtgctagtttaaaaaatagtaccagtacccctacatattactctaacagattctttgcagcagagctgatgatagggttatcccttcagactttctgcctacaagctacattaattggatgatgcaaagattggactgtaaactagttcaaccattgtggaagtcagtgtggcgattcctcagggatctagaactagaaataccatttgacccagccatcccattactgggtatatacccaaaggactataaatcatgctgctataaagacacatgcacatgtatgtttatcgcggcactattcacaatagcaaagacttggaaccaacccaaatgtccaacaatgatagactggattaagaaaatgtggcacatatacagcatggaatactatgcagccataaaaaatgatgagttcatgtcctttgtagggacatagatgaaattggaaataaccattctcagtaaactatcgcaataacaaaaaaccaaacaccgcatatcctcacacataggtgggaattgaacaatgagaatacatggacacaggaaggggaacgtcacactctggggacggttggggggtggggggaggggggagggatagcattgggagatatacctaatgctagatgacgagttagtgggtgcagcgcaccagcatggcacatgtatacatatgtaactaacctgcacattgtgcacatgtaccctaaaacttaaagtataataataaataaataaataaataaaaaagaaaatgaaaaggaaaggaaatcatgaaaaactatacaattttacaaagcaatcatgaatatcacaaaatccagagaaataaaaatattttttaaattaaaaaaaaaaaaaagaaaatactggttcttcctgtgcagagaaaggagaatacatgccttccttaccaggaagatctacagctattagctagcatggaaaggagaatacatgtcttccttaccaggaagatctagctgtagctagcatggctcactattatcttagctcattagtctttttaaccttttgcctttgcccttgactttgagtcatgatgttgagtagaaagtgaaaaacttgccgaggggttcatttgattccgttgttgtggatatttcattctgtccacttttcctgggcagaatgaataagcctgagttgcttttaatccctgttgctgttctttgatattgaaaaacattctactcacagtcgatctgcaatcaaaatccccaagccactgagaagagatctaaccagatttctggtggcaatttaactccaagttgatgcaatcagtactctgcacaggcaagtgtgatgccattaaaggcttttccccctttgtaggttcacaaacttagcttttgcaagcagtagagaggcatgcaatgtagaagccaatgagattatagcctctgaatcagatttcatacttattaatgcaatcatagccttttgctccaggacttttacaaaaccaacttgacttcttcaaaccaatttgatgctgaaatggtcaaaaagaaaagtaacattaaatgcagggtgcactctctgctgtttttgcttacctttttttcttcccccattctccattttaaaatacgctctttcacagaataccactctaaagttacgtgggcatttgctttcccccaaaattcatatattgaagccctagcccccagtgtggctgtatttgaagatggagtctctaagaaagtaattaaggttaaataaggtcataaggttgggacactgatctaataggattagtatctttataagaagacacgtcagagtgctctctctctctctgtctctctctctctccctacgccctgccccacctatacatgcatagaagggagatcatgtgaggacacagtgggaaggcagccatcagccatccaggaagagagccctcaccacaaaccaaccatgctggtaccccctggtctgacttgcaggctccagaactgtgaaaaataagttgtttaagccacctattctgtcatattttacagaagcccaagttgactaacacactgttaatccaggaaattctaaatattttaagaaatttggtagaagtattagatgaattattcaaaagtccttggaaatgggattaaatgataaaataatactaacgagaaaaagtttgatcctctagaaatgattaagtaaaagatattttttaagtcttaaatgagaaccagcagcttctggtcatgtagtttccttcttaataaaagactaaatgctattccccctccccacacactcccatgtgcacactcatatatcttttttgaataggtgccatctaagtctgtttaaaggtagaaatgtttctgtacaattgagacctaactaacaatatattctaagtgtttgagtgttggatctggactactctgttttactgagttaatgaatttacttttcttatggaagaaagcaagaaaatgagggaagaaaaatctgggtttacttaagtagttgaagatagcacaatagattttcaaaatgaccagtcaaaaaccatgtattctaaagggcccaggatggctggcttcctttcttttcttttctttgtttcttgttttagatataaagtaaatttgttaaaaggcaaagttggcctttctccaacaacaataataatatacgctttgcttactgctacacctcttccaataacatggtgcctagcacagagtgggtacgcagtaaatataagtgaaatatttataagcgatatatagatgaaaaaatattatcaaggaaaaatccagctggattacaaatacatttaacaggaaaaattaaaaagtgacttctgcttttattattgatctacaataaaacttgcagtacaagagattgatataatattaaatatttcaaccataatctatatcaaggtatttttttttctcaaaatgatggtgactcacaaaagaagaaagtaaagaaacagattatatctaggcacttctatgtatttaaatattcaaagaacaaagggcatttaattttatccagatttagaatgacatgttcattatctcaaaactcctttatataacagcaattctgcattcaattatcacaatgtatgtactaaagttattaccatacttattctttccctctgaaatacaaaattttactatctagtaattgataccttgacaagatgtaaattttgctgaaacaaaactatatgttcaaagtcataagaaaccatgtaaggttgagaaatattaagagactgattgctcattataaatgatttatattaatagaaagcataacttttcccatcacctgactttataccacttttgaataactggtcataataatttcatgccagatttaaaaaattaattattaatttaatatgacagcattctttggatgtgaggactctgaaattgtctaacttattgtcttggtttgtttaggctgctataataaaatatttttttgaataagtaatttataaacaacagaatttattgctcatagctctggaggctgggaagtctaagatcaagtgctgggagattctgtgtctggtaaggacctgttgctcatagatgacaccgtcttgctgtgtcttcccatggtggagtggctgaataaactcccccagtcctcttttaataagggcactaatcccatttatgggaatggagccctcatgacttagtcacttcccaaagcccttacctcttaataccatcattttgagaattaaagtttgaaaatatgaattttggagggacacaaacatccagatcatagcacttgctaaggtttcataatgagtctgcatttgaatctttgtctgtttgactcaactgtctttccttgcagtcaagtgtgagttacctgttcctcctctattatccactctaacggcttctgtgtctctcttcagggaacctcagagtggcttcgtcactgattgcacatttacctttttgtagtatctgtctgtttgacttcataatgactaaaagcaacttgagacttctatatggttggaacctagcacagtgcataatattcaataaatggaccgggtgcagtggctcacacatgtaatcccagcactttggtataagcctccaaagtgaggtgggcagatcacttgagctcaggagtttgagactagcctgggtaacatggtgaaatccgatctgtactaaatatacaaaaattagcctggcatgatggtggacatctgtggtcccggctacttgagaggctgaggcaggaggattggttgagcccgggaggcagaagttgcagggagctgagatcgcactccatcttgggtgacagagagagactccgtctcaaaaataaataaatattcaataaatacactgtaatttactgaatgaatgaatgaatgctgttagtaagggccatctctgcattttgcagataaacatgctcattctcaccttatcaatattcccccaaactcaagaactcttctccatgaagagctatcaaaggagagtcattatcaaaaatggaccagccctgattcttcttcttctcctagaaatgtaatttagcctttgccctactgagagtgggccatgcaggttagcaagtagagtcacgggaaacacttccctgtgtttttctcaagaaacaggtatcctttctgtgcaggattttttttataaaggcatcgtgcaagaatcacaaattaacatccctatttccaagctatgggcatatgcattccatgtgatgtatgtctctgagcaaagttatcttcaagaataagtattacctcaagtgaacacaagagctcatgatcaaaaatgatggcaagaaacctggagaagctcaaagtaataaacagagttcacaatccaaaagcaagcacaccttctaaggtgttcaaaatcaacttcttagtattctgtacgaaagaaacatgttattttcatagaggagagttggaaagatttcttaaaatcctgggtctcactcagcctgagaccatgaaatcaatgtggttttgtgcaaagtgaacattacattagtgtttgttgatggaataattgaaattttaaagtcaaatcaatagacacttatttaaggaatatcaagtactctgcagggtgtagagatgattaaaatcacaaataatttatagttcaccttagtcaagaaggtataatcatcatgataatgtaaataaatcgatcaaggtataatgaaacaacaacaagagtgccacaagacattacaaaataatctgccaagcgggtcaggcagcaactgattatagaatacatgaggcattcatacaactctgatagcttcatgcccatacttctggcagatgtcactaattagtcacagggctttatccttctgggcccaggcgcatcctcaaaatctttctcaattttgtgagtttggcagccaattagctacagctggctggcaagataaagtctatttgtcatccctgccttatgctattcctcacatgccatggtttgggtcgtgtaatcctattatgtgccaccctcttcgatttctgggaaatgatctgaattgactcatctttttcaacctccgtcttcagggtcatcctttattgcagagactggaaagtgaaacactactttcaatccctttgcaggtagtattctggatttcagctccacttgaatttggcatggaggggagagaggcaggcccagggtagaggaagcatagttctgtgattgtaactcctggggatggagggttctcgtattgcagtggcagcttccttgagcatggcagaggtctggtggctgggggttgttactagaagcctcacctgcagcctattcattcagcccttctgactagcttctatgccacttaaactgtggtaatacaaccctttcttaaacacggcaaaatgtgtctactgtctgtaactaagtcctaataaatgtagcgcttttccctcaaacagctattaatatgaagtcttcccagaacagagtacagtgggtctctactttcctcttatctagaaactaggtatctgtgaacagacactgataccctgttaagtattggaagcctccaatcatcaattctgcaactaacagtctgcccttgtgtggttccctcatgccctctgagtctcaggttcttcatctgtcaaatgaagggattggttctgattgatggtggggccacttctatcttgagcactctttcaacttgataaaatgattttccagcaagtcccattcaatccaaaatactgaaaaatctacttatcttctaagaaactttcttgaatagagtgaaaaaaaaaattgagtagacatagttgattacctgagagaggtaagttgaagctatttctgagatacaaaccttacagtttaaaaaaactttaggtattccaatttcatttcatagatctggaaactggacaaattatatgcctaaattcacacatctatgggatggcattcagttcttttagttccatattaagtaatatcctccttttattattttaattttacttcagagcaaatgggaaggttatagtgcttattattggaatggaataaagaaggtaaatggcaatttacattatttctcagcaatgctcattagttatgtgaccagcccttgtgccaagccttcttgtgtattcttgacacttactgaccttctaacgcctatcacttcacacctatgtgtgattttctaaatttgattagaccttttttgacagggatctatctttcactcttaggaatcctctatgtgccttacattatatgggcattcaataaatgtttaccagtattcaattgaattacccttaggagaaaataaactttcacctctgtaagaaatcagatgtataaaaatgcataatgttttttaaacgttttctcttgggaggctgaggtgggtggatcacgaggtcaggagattgagacaatcctggctaacacactgaaaccccatctctactaaaaatacaaaaaaattagccgggcgtggtggcgggtgcccgtggtcccagctacttgggaggctgaggcaggagaatggcataaacccgggaggtggagcttgcagtgagccgagattgtgccactgaactccagcctgggcgacagtgcaagacttccttccaaaaaaaaaaagttttctcttactttattattattgcatagttatggctttattcatttcttgccactttatttaaggtgatgttcaaaaatgtactcactgcagaagaataaaacaatagattaaaaatgagagaggaatctaagcaagaaaataaaagcaagttaaagaaatgtattctaaatctttttatgattaataaatatggtttttaaatttgactttaagcatcctaacagccaaggcaagaagtaaaacaacctcttacaaaaaaccaatggccgctatttacaaatttatgagatgctggacaggatagcttttaatagaactgaatagaataatatggtgaaaagaacatgtatcagaagttagaataacacaaataactgctagcatttgcatagcatctattatatcaaaacatttttatataaagttcacttagcctcacaattctgatgtatatagtttgattagtagtgttacaatttttaaagaaagaaagaacattaaagagaaggaagacaaggaaaaagaaagaatagaaaaagaaaaagtggaagaaaagaaagtaaaaagaaaagaataaagggagaaaagaaaaacagacttactggggctaaataactcactcagcaaaacagatgcattaagtaaaagaccaagaacgggtacctcggttttctttcttcagattccacattcttccttcagattccacagtgaccctcttgagagtgagggttctatctagttcttgtcactgacaccactgttgatttataatcatattaatatagcttattgaattgttacaattagcaatgtgtgcttgaatcagacacactatactcattatctctggtcttaacttcataatgtatgatcccattttatagttctggaaactaaggttcagagaggttgagtaaagggtccaagacatacagcttgttaagtagctgatcaggaatttaagcctaagatcttatatctagtatatggcagagagatattatttcattccaggtttgcttggcttcaaagcctatgtcctgctgctaatctgtagccttctcaccaaccaaccatatgacttggaacgagctgtttacgctcattcatttcagtgcccatgaccttcagatatgggataacgagctgtgctttatctgccatgaatgcggtcaaataaggagaggcatatggaagccattttggatactattatagttattttaagtacactaatcacactgtatattaagaacattaatacttgtaatttaatcaccaaactgataaaatatagaattatctaaaaataatggtataatttgcatatgttataggagatatctttggctcttctcatggtattctctgctttctggcctcacatcccttcagaggtgcaggcttgatacagcaaaagacagaaggcaggtgtttggcctggagccctcttaagagatacttgtgaaatgagtcttaactccatcttctgagaaaatgattcaaatcatcgagccaggcaaggattacatttgtaaattttgttaaccttgatatgaattgctactacctgggtctcttgtttccttagtaaccttcctcaataagcattcataggaaagtttcttataggaagtgttatagaaaggactcctgtgaaattcaccagactgaggagattgacttttatggctcagaggatgcagtaggcaaagttcctaatggccagtgaagttcctctttcagagaacacaaatccaaagtgaattctgcaaaatctaccactgtacttattccttcattgagaaaatggggtgctttatggataaatgcatggaaaagtcagacttcgaccaaagtcaaagggcaatagaaaccctttgcattctttctaatgacttcaacctgtggagtttggaaagttacagattcctctggagggtaacatatgtacaggcttttttccctatttctttataataaaaattgatgaagaggaatacgtaaagtgtggtttccctttaggcagagttcagtggaagtagcattatacatagaagaactttcagctaaacttagagagaaacagagacttttaggccaatcattttcctaaatgtcactgattttgtgggagtaagtaatagcatctttcctaggcgtttgttacagaaccacgtaaagagctctactatttgggagatatgcaaacctctaaaataatctaagctaattagaaaatatctgtagctgacaagaagctttgtatctctgacatcaaacagtgcctggaagaggtgtgttggttttcaccagcatgaataccagcagtggcagacaccttcttaccaagagagtaaactgatggacatacacagcctatgaaaaaattgacattgctgagacagcgctggggattaacctttacagctgtgagatgtcaagcaaaattgaaatccaaccattgtggagcatgttgaaatcagtgggtgtatacaaatctctaaattattactttggccagatggaaaaggttccatttactgcctgctggaggaggtttagtcggtaacactgaagagggaaggaagattgaaaatgaggtatttttcatgtgcactaaggctgctatccaagagtagcataagagaggatagtcacaggccaaatgggtgacatggttcacctcttggccccctactacaggtagccaaaataaatgactgtactttgaaataattgcctttagcagcacgtgtttactgtcttctgttattacaattgctaccctataatgtacttagacagcatttaacttgctatggtttcagacagtgacacaggtttaaggcttggctccaaaatgctgaaattgtacacaagtttaaggcttggccccaaaatgctaaaattgtatctgcaagaaagggtatggatgagaattgttgaaagctagtatatgctaattcacagaggagactgattattaaaattctctctccttctatcctaggtatttttcttctttttctacttggaaaactgttaatcatccctaaaatctcatgacacactcactctctctctgatgcattccccagctccagtaaacagttagttgctctatcttttgttttaattacaccactatcatcgcattttatgaggtttctgtttgtgtatctctcttcccaccttgaacccttcaacacagaaaccttatctttaacggagttcaatgtggttgttaataatgagctctgcaaggagaccatgtatgctcaaaccctgatttcacagctgtgtaaccttgggtgcaatccttaacataatctgtaagatgaggaaaatgggaatatccacttctttgaattattgtaaggattaaacaagataataaaatacaaagtgctttgaaaagcaccaagcaccaggctcagttaagtgtttgccattatttcatttttaatatcaccattgtctggcttaatatcaggcatagagtagacagactgtgcataaaaaaataagaaaagttccataacaaataaatacgtcaacagtgtttattttttgcatatttcttccttagttcttcagatagttaggatgaaatgaggagcacatatgataaaagcatgtgttccaggactgagtttgaatgcccccttgtcccaaattggagtgtcttcaataagcctccccttattttcttaaagtattttatagggagtcaaaagtatttgtaagcatgcttatgccctccagagtttttaaaaaagaattcaagcaagaagaggtggatatggttggccaggtttctattaaatgactttcttcagaagcattttgacaaaattaggcacagccaggaaagcagcaaaaaatctgtcgtttctcatttgctgaaaacgccattagctgcctcttctcgccttctgctcacggacacttggctcttgttcctgctctgccccctgtgcccagtctggcagataatgcaccagaaaatatttcacctcatgcacagggagtgggaactcacacaaggaagtttgcaaggaatggaaatctgtgcaaggcaatcccctcgtcctgagaaggaccccatttagcaggggcgaatatccattaaactctgatgaaaacatactcatgcattcaataaatatgcagcacctacaaagtgctggtgttttaggtgctaggaatccattagtgaaccagaaatgaaaacaacaactaaatggatgttaaacaaaatcagtctattagaaggtaatgaggtactattaagaaaaaagaaagggagtcagagggtcctgtaagaaggggcaagaggtgtgcagttttaaatggaaagattaaggaagtctctaataagacattggagactgatcatgagtaggaggcacttatatcagagtttttgcagtttcgaaaatgcattttgcactttggtgtaatttacttcacaaacaagggatgctcttaaatatttgcttatttaataactttctgaatactgagggatattttcctattgcttttccacttcataattaaatatgaatttcttggacaaaaacaaaaggcctaaggaaaaggaaaatagaacttaagagctcagtaaaaaatgtttattttttctatcttttcaaaaataatatgcaaggcaaatcacaaaatgtgaaagaacaaattacttttatttttggattacttaacaaacaaaaggaaaaaaaatctctggtaggtagctcaaataaagaaaacatcctgaattaaaaagctatctaactttatccagccaccatcctaatgttctatcacagatcatgcctctgtgcaaaaaggcctgatttctgagagtttaaaagaatcttatggttttgagaaatgaatacactgatctcttgcgaagaatgaaaaagccccaaaactcagcaaaggcaacaattcaaactaccacaggaaatgaaaaagagtgtgcatttggaacatacacagagttttaaaaaaaacaaaaggaaattgatatagataactcaatttccattagtgtttcataaatttaaattgccttgtgatcaactgagtgcttgtataaactacaaagcgctggtgtggtcccaagatgagaatgtaaaagtataaccagaaaaattaacataggaatcaattaccctgaaaattctgatctcagaggtccctggacagaaaacagtgctccctggaatgacatgaaaagaaatagacaaaatatccatatccacttctatataaagagatactaatgcactgtatacacaacttgggaatatctgcacatactttgattagaagtgagtttataatgaacaatgctcatgtgcattaactcataatactaacactttttactggagattatcaagaggtcagtgatagccaaagacaccttttctcccaccccttcagtttccatgactacgtatctttcctaaaccaccctggcatcacttgactcactttcttcctccttggggaggaatgacttttctgatgggtaaatttaggaaggataaatttcctgctgtgctcaatttctttcctgctttgctcaatttctcctctttgtccttctgggagcaaattgccaaagaagcagaattctccactgcttccaagcctaagtgtcccctgggcaggaccactctcccctacaccgtgaactggggatccatccccatcagcatcactcctgacacctaattgcacacagcgaattttgtgactgtcagcatcactcccgactgggaggctgagtctgcctaattgtggacctaacctgcaggttcttgtgcttcttgcactaaccaaagcctcccacctggcttccatcattaacagagaccttttcttctcgttgcccatgtttctgttttagtccttatttgtacagaactgagtaggggtaaaggtgatgttatttactggctctctctgagggaccctgatagtcagaacaagagatgttgtcaggtatacatacagacatcacagtactaacattgggcatggatggaagcattaaaaccaacaagccaggtttgtctatcccatttacttcaaaaacacaccttaaatttttacttattttatcattttgttcatttgaaagtaaattaaaaaacataaaaatgcacaccatcaaatgacatgttgcagtgctgaaaaatatgtgaagaaaaatgtatagatgagcgataacaggatttataactcagtgacaatctcagctttacgacatttaaattgtgaaatctctaaaagccctaaagtgttgttcaactcatgtcttatccatttcagtttggcttaccataaagtataaacatctagttagaatattttgacagaagaatattggtgagtcattcaatttctctaaccgtcactttgtctgtaaaatggggataaaaaattttttctcttaagttgcacaaaattgaaatgggagcatgatttccgaataggccagacatggtggctcacatctgtaatcccagcactttgggaggcgaggcaggcagatcacttgaggtgaggggttcgagaccagcctggccaatatgatgaaaccctgtctttactaaaaatacaaaaaaaaaaatgagctgggcatggtgacacacgcctgtagtcccagctgctggggagggtgaggcatgagaattccttgaacccgggaatcagaggttgcagtgagccgaaattgcaccactgcactccagcctgggcgacagagcgagactccgtctcaaaaaacaaaaaaaaaaacaacaaaaaaagaaagtataaataataaaataacacactattacaaatgatcatcccttttgtgaactattattattcctattatatgaacactttttttttaaaactcagggagtcatgtaactctgctatatgtatttcttcaagttaaataacaatgatttattaatgaactcctacatgctcttaggaaaggtgctatgtgtactatggattaaaaaaaaagtagtgcatgtttctcacattcaagaagcttttatttaagagaagaaatgcaataaacacagtagaaactaagtaaaaagaaattaggagagtggattttgtgcagtgaaagaggaggttaaaaaataagagggcactagacatgattttaaggataactgagctcagatggatgcaggagagcaggctggtgatttcaggggaggcgaataagtgggaaatattagacgagaatgagcatggtgagagcgctggagtagaggggcaagttgattctctactctctgtttaacagctctttgagctttgttatatttcatcaaggtaaaatatatatataaaaaaaaagatgggtgccaacctctccacatggtgtttggttagatgtggcaaaagtgtggtttttaaaatctatgtaaagaactccatgaatttccaacttattatactctaagtataaaaattgctgaatatcaatgattatacactacaaaagaattgccatttatgggctttattaatgttctagaacctataagtattttacatacttatttatacatgtgaggtcctcagcccttaagacaaccttgtgaaaattggttgctgttttacatagagaagcttgagtttcaggaaaatggaatcactcatgagagaacacagaatgtgtaaatggtggaacaagaattcaaacccacatctgacttagaggcttacccacgatgcagtcaacacctgaccatagtatccaatgacaggggtggaaattagattttgacatgaagttaaaaacacagttaaagtatgtggttcaaatatttaatcattctgggagcatcattctttatgggtgcaatccacattctctttagagaagaaggatattactgtggcaacattcaaagaaagtgcacttcagcctgaagctcagcaagatcgtcttttttgggggggaggtggtaattaactgagtgccctggccttcatccacttttctgatgatttccccagctactcagggttaagcttctgtcacaaaaattattctgagccatttgtttagcctgtttgatgttcactacatttattttccttaggcagcagcattgtgaatgttgactatatttaacatgcttagctgtaccagggaaataatcatctttggcttatttaaaatatccaattttcttagcctttgaagaaaatctagagctaatatggagtaattggtgatgagataggacagatccaagtgcaatttcaaggctcctaattttcacctacagagtaagatttctttattatgttagaaaatgttttggagagattttttcaattaggaggcacattaaacaaatactggctagtagtgtacgggttcaggaagaggggtaaatctcttagttgcttactttctttcaagaaaaactttaaatgattctatttaaccaaagagaagatggagagaaggcaacataagaatgtaattaagtttaacttttaaccttctgtttgggatttgcctctattctttcccaccatagttaagtgtgaagatagtcctcatccatatttagaagaagcctcaaaaagaagcaaaggaaggaaagaataaatagaagtattcactgtctatcctatattcctgccaatatctgggagtggcctcaaaataatacccttgctatctcagagcctatattgcttttgatacactagcagtacttctgtggttttcacggaacacataagccaagtccatgactgaagaccatggcaccataaggaaatctcaccactgacaccatttataatgaaacaaatgggttttctaagaggaggtaactcatggtataactgtcgtggtacaaggtctcaggccaggccttcccacttaaaaaatttccctccatttccaatcttagcaattttacaaagaaactggtcaactttccttaaataattattccaggacttaacttgtgccctaaagaatagacatattctggtctctctggagtgtggagaatgagaagatttgttttcatggaaaaatgtatctactcattttagacagccattggcaagaatagttcctattattgtaaaatgtgtgtatttgaaatatattagctaggcaggtcaactctgaactttacaaagattttgcaactatagaatttctttgctgattttgtgtttttccttaaatatagccataaatgctgagctatatgttagttttattgttgatgcattgtagaagagagatacaataatactgaggctaacttactattttgagctttaaacttttagtctaaaatctcatctgtgcaaattcttaatgaggtacattttcaaagagagctttagctatataacctctgttgtcatgaagaaatgcatttggctaatttcctctgtgtctccttgaaactttacaataacaggaaaaagttaactctgacttttcactcaagtaatgtttagaagtttctgctaattccaacctcaatgcaccagagatatttagggattgctgaatattgggaagatagatgtaggatttggatgtttgttcaggtgcctcagtcttctaattattttgtcattatgcattttcccctgtaatttgtttaaatttggaatcacatcaccaattacttcattgctgtctggtcttcaatattctcttgtttattcattagagaatttctgtgacaggccattaataactatgcatttgctgacgtataaagtcacatatccttaattatgttcaaatatctgtctggggaaagtacttgattctaaatgtactatcctgatcttactaatccaggtaccttagtgtatgtcttcacttaccatagagatttagaaaataaaaaaagaacacttagtactaaaagtaagactagcatagaaaaaacttgagctctaacttcagaagactgtggttgattccaattctactgattgctagttcataatgtagtcaagttacttagcaaatttgaagaaatttccttatctataaaaatggaaaatacctatggactatctcatgtgtaacagaactaagcttattataacttacaaaagataaatattcaaaatcagcataaagaaaattatgtttttggcaactctattcacaatgtttgggattcttcctacctatagttatgtatgaagaagtcacactaaagtaaccattagaaaatctgggttacaatactaggcacttttaatgagtgcttaccatttaatgagtactaggtatgtggcttgtctcaaaattattctgtgtctcagaagcactctgtgaagttggtattatgatgattttcatcttatgggcaggagaactgaggttcagacaggtttggtgatttgcacaggaccacagccagcagcatttctggaaaaatttgacctgtgtatcttcaaagctcagtgtgtcctaaccttagtaccattctgcttctacaactaagttctagtattaagtcataaaaggaccctgggcaactcattactttatcatgacctatatcttagggaagtttgaatgagctttcatgtcttcttgctcaaagtatgcatgattattggtcttaaacttcgtcacatgaacacaataccccacacatttacttgagatgaacatgggcctgcctcttatgaaagatattactctctcgacacaagaaatggaagaacattccatgctcatggataggaagaatcaatatcgtgaaaatggccatactgcccaaggtaatttgtagattcaatgcaatccccatcaagctaccaatgactttcttcacagaattggaaaaaactactttaaagttcatatggaaccaaaaaagagcctgcacagccaagacgatcctaagcaaaaacagcaaagctggaggcatcatgctacctgacttcaaactatactacaaggctacagtaaccaaaacagcatggtacttgtaccaaaacacatatatagaccaatgaaacagagcagaggcctcagaaataacaccgtatgtctacaaccatctgatctttgacaaacctgacagaaacaagcaatggggaagggattccctatttcacaaatggtgctggtaaaactggctagccatatgtagaaagctgaaactggatcccttccttacaccttatacaaaaattaactcaagatggattaaagacttaaatgtaagacctaaaaccgtaaaaaacctagaagaaaacctaggcaataccattcaggacataggcatgggcaaagacttcatgactaacacaccaaaagcaatggcaacaaaagccacaatagacaaatgggatctaattaaactaaagagtttctgtacagcaaaagaaactatcatcagagtgaacaggcaacctacagaacgggagaaaatttttgcaatctacccatctgacaaagggctaatatccagaatctagaaagaacttaaaaaaatttacaagaaaaaaacaaccccatcaaaaagtggtcaaaggatatgaacaaacacttctcaaaagaagacatttatgcagccaaaagacacatgaaaaaatgctcatcatcactggccatcagagaaatgcaaatcaaaaccacaatgagataccatctcacaccagttagaatggtgatcattaaaaagtcaggaaacaacagatgctggagaggatgtggagaaataggaatgcttttacactgttggtgggagtgtaaattagctcaaccattgtggaagacaatgtggcgattcctcaaggatctagaaccagaaataccatttgacccaacgatcccattactaggtatatacccaaaggattataaatcatgctattataaagacacatgcacacatatgtttattgcagcactattcacaatagcaaagacttggaaccaacccaaatgtccatcaatgatagactggattaagaaaatgtggcacatatacaccatggaatactatgcagccataaaaaaggatgagttcatgtcctttgcagggacatggatgaagctggaaaccatcattctcagcaaactgtcacaagggcagaaaaccaaacactacatgttctcactcataggtgggagttgaacaatgagaacacatggacacagggtggggaacatcacacgctggggcctgtcaaggggtggggggctgggggagggatagtattaggataaatatctaacgtaaatgaccagttaatgggtgcagcaaaccagcatggcacatgtatacctacgtaacaaacctgcacgttgtacacatgtaccctagaacttaaagtataataaaaaataaaaataaaagtaaatagagatattactctctctactgcctccctgctatttaaattcatctaagtaaactacatctactactaagtcccaggaaatatttatttgaatatgcatagcaataattttatgcatgccaattttcctcctaaatacagacccaggaaatacttcatctggtacaaaagtatgttattttttctttccatgaataatctaatgtctgcttagtaccagacttgatggttaaaatggatgtgataattgagaaaactgttagcccttttcataaagggagtgcatctggattgacaacaagaaagaagaacaggaaaactagtttcaagctccagtgagaatttcatacttacagaaaattaaaattcctaatattggtttaaaagccattagcattccagccctaagacaaagtttcttggaatcaccaacacccactaacactgagcttgccaacatgtcattagggctcaccttccaagtgaatcctaatcaatagcctgtcctgacactgcagtgacccaaacccccggttactcctcacattacagtgggacaggtaaatttgtgtgtcccttttgacatgcaaatttgctgcgtgtgtgtttgtgtgtgtgtgtgtgtgtgtgaaaagacctgaaacagttcattctcttgtcccattaattccactctatgactccatcctaagaacataattctaaatatataaggaacttcacacacagataattcattacataattttccaaatactaaaaaaagaaattacttattctaaaatcaggattagtaaactatattacacacatttatagactataatataggtattaatttatgaaaaatctgtaatctaatgtaaaaatacttgtgctctaatactgaatttaaatctatataaaattttatagtaatacaatattattaagtttaagggatcagatatacatggagaaaaaaactgaaaataaacaaatgaaaatattatcagcagtttttttttttttgagacggattcttgctttgttccccaggctggagtgcagttgtgccatctctgctcactgcaagctctgcctcccgggttcactccattctcctgcctcagcctcccaagtagctgggactacaggcgcccgccaccacgcccggctaattttttgtatttttagtaaatacggggtttcaccgtgttagccaggatggtctcgatctcctgacctcgtgatccacccacctcggcctcccaaagtgctgggattacaggtgtgagccaccgcgcccggccagcggttattcttagaatggtgggactgggggtattttcttcatgtttctttcttttctatttatacattttcctcaatgattgtttattacctttgtagtagaaaatcatatacttccccaacactcaggtttcatttccaataattttcagtgctttgatgttttcaaatttaaatttagtttgtaatttatgaatgcgtgtatatataaaggcttacaaattgtgtttggttatacctcaactctatggttctcaatgagggttaggggagtgatctcacctaccctgcacccactggacatttggcagtgcctcgaaacacttttgcttgtcacaactcccagaaaggtgctactggcatttaattggtagagaccagggatgctgtcaatcaacctatagtgccgaagacagcacacaactcaaagaattatccagccccaagtgttcatagtgccaaggttgagaatccctgcctaaaacaaaatgtttaaaaattattaatatattaattcaagcctgttgtgcaaattctgagtagcctattgtattaccagagcctctgaataaacttgcctgtccatgatctacctaacagttcactcactcccacagggcattgaggatggaaagataagtgctctacatatgcggtgcttgaaatttagcaaaagagaaagacatagacatcaagtgtttaatgcagtttgaagtgctatgaaacgggcacttgatctaactaggtggttcaaaggaggctttctggaaaaaatacctcctaagctgagcttaaaggataagaaggagttaatcagaatcatgtgaacacctgagagatgtgttctagaaggaggagcattcatacttcaaagaaaggcatgaagatgaaacagtttagagtgtttggaaaatgatggggagtttgccagcactagagcataagataggcacagaagaaagggagaaggagccatagaagtttcagagccagagcctctttttttctgcctgagaaagtcaaagtatacttctcagtatggggatgagattgagatcagacaagtatgttgatttaaaaagcatgttgatttaaaaggacaagtatattgatttaaaaggacaatctattaaagatgcaattgaagaacccagtaatacagccatacctcaaagatcatgtgggttctgttccagaccactacaataagacaaatatcacaatcaagcaaaccatacttttttttttgttttcctgtgaatataaatgtttacacaatactgtagtctattaagtgtgcaatagcattatgtctaaaaaacaatgtgcaaactgtaatttaaaaatactttactgttaaaaattgataacaatcatgtttcttcagcaatcttgcaaaaagattagcaagtataatatttttgctggtagaactggccttaatgttgttggctgctgctgatcaaggtgatagttgctgaaggttggagtaattgtggcagtttcttaaaataagacaatgaaatttgcctcattgattgaactcttcctttcacaagagatttctctttagcatatgatgctgttgacagcattttatccatggtagaacttctttcaaaattagactcaatcctctcaaatcctgctgctgctttctcaaataagtttatgcagtattctaaattcttagctatcaattgaatgatgttcatagcctcttcaccaggagtcaattccatctcaagaaactgctttctttgtccatctagaagacactactcctcatttgttctagtttgatcatgagattccagtaattcagttaaatattcaggctccacttctaattctagttctcttgctatttccaccacatttacagttatttcttctaatgaattattgaacccctcaaaatcattcatgagagttgaagtcaactttttccaaactcctgttagtgttattttaacctccagtaatgaattgtggaagttcttaatggcatacagaatggtgaatcctttccagaaagttttcaatttatttcgtctagatctatcacaggaatcactctttatggcagctatagccttacaaaatgtatttcttaaataataagatgtgaaagtcaaaattactgcttgatgcaggggctgaagaatggatgttgtgttcagaggcataaaaacaacattaatctcctatacatctccattagaactcctggacaagcaggtgcattgtcactgagaactaatattttgaaaggaatctctttgtgaggagtaggtctcaagggtgggtttaaaactttcagcaaaccatgctataaacagatgtgttgtcattcaggctttgttgttccacttacagagcacaggcagaatagatttagtatagttttttttaaaagtagtgcggacccaaagagtgagcaacagcaagatttattgtgaagtgcaaagcaataaagcttccacagcatggaaaggggacccgagcaagttgcctgatttagcataatttttaagtcaggcaaaaagttgacttcaactctcatgaatgattttgaggggttcaataattcagtagagaaagtaactgcaaatgtgatggaaatagcaagataactagaattagaagtggagcctgagtatttaactgaactactacaatctcatgatcaaactagaacaaatgaggactaacttcttctagaagggcaaagaaagtggtttcttgagatggaatcgaatcctggtgaagtctaggttggaatggtaaatgagtactggcttcaacttaaaatcatcagctgcattagctgctaacaagagagtcagcgtgtcctttgaagctttaaagccagacactgacttctcctctctagctatgaaacttttagacaacatcttctcccaatagaaggttgtttcatccacattgaaaatctgtttagtgtactcactttagctagaccttctaggtaacttgctgtagctactccaatagcacttgctgcttcgctttgcactcttatgttatggagatgacttctttccttaaacctcatgagccaaactctgctagcttcagacttttcttctgtagcttccttacctctctcagccttcacagagataaagagagttagggccttgttctgggttaagttttgaattaagggaaggttgtggctggtttgatattctattcagatccctaaaactttctccatatcagcaataaggctgttttgctttctcattcttcacgtgttcagtgaagtagcacttttcctttgagaactatttctttgtgttcacaatttggctaactggcccaagaggcttagtgtttggccagtcttgactttcatcatgcgttcctcactaagcttaatactttctagcttttgatttcaagtgagagatgtatgactcttccctttacttgaacacttagaggccattgtaggattattaattggcctaatttcattattgttgtgtttcagggaataggccggccctgtggagagggtgagagactggggaatggccagtcagtggagcagtcagaatacacacaatatttatagattaagtttggaatcttacatggatgtagttcatggtgctcctaatctgaactcgattattcctgaggtatatggtataaaaatttctctagtaataccaaagatcactaaaatatatataataataacgaaaatgtttgaaataccgtaaaaaattccaaaatgtgatacaaagacacaaactgagcacatgctgttggaaaaatggcaccaaaaggcctgctcagcagggttgccacaagccttcgctttgtaaaaagcccattatctgcaaagcacaacaatgtgaagtgcaagaacacaaggtatctgtgttatgcctgtatcattgagcctgggtaacacactccttatagctctggacaccgtgaaaatacagggaaaattcaaactgtactaaggtacagtgttctctcttgttcagctggagagaaaatgaatgaacacaaattaagtaatttgagggacagtgcatcaggattcattattaagtgtgtttgctgtaccacgtacatcaggagtaactgaattcagattagaaagaaagggtggtataaaagagagggtgggtttcacttaaagctgaaatggaggaagggtggcacttgtataggagaaggagttctaggaataatataagccaggagtttgaaactgagatcaacatcaggtgttcttggaaatgctaaggtaggttttttcaattgccagtggttctcaaggctgcttgatgctcagtgctaaaagtgttgctcagatgcagctcaaagatcacctctttgagtccgttctgatgctctccactttctaaataggattggtcagtctttcttttatgtccctctaaaatctacatagacgtgaggcccaggcaatttactaaactaattttttggtatgttcatttatatataaacccaatgtagccaaaattatgtctttatgttctcaatgactagtacagttcttggtacacagatcacactcgaaaacctttctttcctggatgattgaatacatgattatgctaataataggtatgatgactatgcaaagcaaagacagcaatgatgttaacactgcaaataatacccaatatttattgagctctgtgtgataggcactgtgctaaggagaattttaacaagtatcatttcatttaaatttcaaaataatgtcatgaggtagctacgactagtactccattttacaaatgagagaactgaggttcaggtggttatatcttcaccaagatcacagccagtaaaaggaaaagctggaaatgaactctaggtctgtctcacttcaaagaccatgatcttatccactacttatagatcttttatttttaagagagtgtagacttaaggtgattttattttattttttaacatttgttcattgaatgtatgtgtcctagactcgaaaggctcaatgtagtgcaacagtctgaatagtaatgtaattttaaaaattaaaatgggtctttaacaaatctatgaaataagagtttgcaaactcaataaaaagagtatattatcaacttctctaagagacaataataccgaaaatgaaaaccaataggacagggcactcaggcattgactcattgtatgacaataccaggcagatggcttaatttatataacaactatctaagttggtccagcagtgtgaagttaggggaaaggaagtcattttattgaaaaaacgcatgtgttaattcaaatcacttgacagtttggcagacaattccaccaaccgcctaaaaagagactagacccccatcccctcaatagtacagaagggatagaaaaacctagttaaatttccaaaaaacaataagtcatcaacctgagacccccttctcaatggttccctttattgccaactctagaacaagggctggcaaaatacagtggtaggccaaatctagtctattctcaattttggtatcacctgccagctaaacattgtttcacatgtaaaataatggttaaaagggcagacattaaataaatatattgtgacatatgaaaattgtatgggattcaaagagcatctacaatgttttattagaacatggccacacctatctgtttgcatattatctacggctgcttttgtgctacaacagagttgaggagttgtgacagactgcatggcccacaaaacccaaaatgtttactactgaaaaagctggctggccactgcttgagaatcaagctcagcaggtgtcagacaacttggcacagaacacactgcagataccatgggtttggcctttccaacttattacctaactcaatggttctcaaagtttggcccctggaccagcagcatgatcctcaagtaagaacccattagaaatgtgaattatgaccccaaccccagatttactgaattggaaactccatgggttgggcccaacaatctgtgtctaacaggtcagctaggtgattctgaagcattcttcagagaacggtagtcaaactcaagaaactggaacatggcaactgttgtttcaacacaattacaagaaaggcacttattggctcctatttgtggatgaagaatggagctagatattccacttatattttagtattcctacaataatcttcaaagattgggattattaaccccattatatggaaaaggaaattgaagcttgggaagattaagtaacttgttcacagttagtgaattaggacttcaactcaaatctgtctgctttatagcctatactcttccctctcgccttattctgccttctcccttattatgtgagagaaggagaaaagcacctgtgggcccctggaaggagctgagctgatttattagttaggtcttggtgttttcttgatgattataaaccatttcatagaatatgaacatcagaaaacaccactgtggacccatggttgatcaatataacaacaagagcactctataatcatgtttgaacagaagcaaaaagatgaactttttctcttttttttgagatggagttttgctcttgttgcccaggctggagtgcagtggtgtgatcttggatcactgtatcctccacctcctgggttcaagcgattctcccacctcagcctcccgagtagctgggattacaggcatgcaccaccacgcctggctaattttgtatttttagtagagatgaagtttctccatgttggtcaggctggtctcaaactcctgacctcaggtgatccacacacctcggtctcccaaggtgctgggattataggtgtgagccactgcgcctggccaaacatgaactttaaaccacaaaataatcaaatacctcctatcccagctaatatgagtaacagctgcttctttacctattacagcttttgtctctgtctagtcttcactacttgcagacacaagttacccaatcacagcatgactctggcttcttgacagcttcctgtccaggtcaatgtcttgctcacttaaaccttctccaaaggcaccaaaatgagctcaaaccctgtaataagtcctaacactctctgagacattccccgtttctctgcagcatgtattctctctctctgcaatgaataataaatgaaaattattcaaccacaggtgtgtttcctgatgatatttggctggagggcattccccttccactcccctcactgcccacttaaaattatagctctcctcttccagcctgggtgaggcacaagttaccaaagtaagtaaaaataattagaactggaaaataatagtccccagactaatcagtatcaagcacattgccaggtccaagcagaaacttggtattttaaataattaatgaaattttcagtgccaatctgattacaaaaatgatttcaggaaactgcctgtcttttaaaaatatagttcaattttctgcttttagtttctagtctctacctgtcaaagttttggatctctcaactcttgagatgtaaaatgtcacttatctttttgcagccttccccaaaatcttctagatggctcctctctttgagttttctaaaggccttactccctctcacaatactttttcatcttggattagttattcatgagctgtctggcctctaaccaattcggaaatttcttgaaggcagtaaaacacctgactatcctcccttcccttccacacagtaatacatatttgttatattttggcaataaatctaaacgtttttccagttacagaattgaaagtgttgcttttccatcaaaccagagctcatataagcggggactctgcaactcattgttggttatcttaattgaaattatctccctggctcaggagttctaacaaacatatgtgtttggtgtgcaggtatcttcactttgccaggggattttgatgtgaaatattactaacagaaaaaatatatatataacaaaaatcttaatcaatgaatcaacagtttttaggctactatggaaacctgaaagtgatactggaagttacttattatgtgggataaatagatatgaactggcactattcctgtatgaaagcaaatggcattcaggtcataattttcttcagtaacttctatttaccaagcactgtgctaaacagcaaggataactgtacaattaaggagaaggagtaaaacagtcaactcctatcctacattttatcgttgttccaggaatttcacgtggtgtatcatggccctgtgcttgtacatggtgttacctcacccagcgttttacatacagtacttggataagcaccattcttatatatcaatcttatacacttctcttcatccataaaagccaggattagaggtcacctccaccatggagtcatctctgattgctttcatctcctctacttggacttaattacctaacattcttcttggattttcttgtactggtctatttaccatgatgtattatattttttatttgttagtattctttttcttcttatgcaactgagaatatcttgaaggcagcaactatctttaattgatctctatattctggagcctagcctagtgcctgacatcctgtagacaatcaataaatatttattaaatgcaagccatgtgaaaacaagtgccaaagtactggtaattattaaagttagataatgaatatatgacaattcattacacttttttctataccttgttttatgtgtaaaatttttcaaaataaaaagtttacaataatcgaggaccttgtaagatagcggattaatctatccaaagttttaagttccttccactatacctatagctatgatctctgcgtactccacatttctttcttttctcataaaaaagatatttaataaagccaaacaaagttgctctgaaataaagtataagtatattgtttccaaagagcttcatgtcatggatatcattaaataagaacttctggaaaaactggaaacggacagttctccccaagtattttattgaggagggaattctgtggatttttgtccttccaatctgccatctgaattgctacaaaagcataactagtatctctgcttccactttctttctttttttttttttttttgagatggagtctcactctgtcgcccaggctggagtgcagtggcgagatctcggctcactgcaagctccgcctcccgggttcacgccactctcctgcctcagcctcccgagtagctgggactaccggcgcccgccacctcgcccagctatttttttgtatttttagtagagacagggtttcaccgtgttattcaggatggtctccatctcctgacctcgtgatccacccgcctcggcctcccaaagtgctgggattacaggtgtgagccaccgcgcctggctctgcttgcactttcttacctgtgaactcatcttcacctacccccaggttgacctacctaaaacatggatctgtcccacttgctcccccaaagttgaagtctttaagtcaatggctcttcaatgtttagggaataagtgtgcacttctagtgttgaaccccaagtaacttgtccagccacatattttaatgttcttagacccatgtgcaacgagccatatccaattcacggtcctaatccatgcaagccacccactgtctgtgcttagattcacagctcaatttccttgctcagcttggaatcttcttcctggattttccaatttgggaaacattctcccactccaaggtcctgtacgactagtttttcttctccattaaaccttctctggagtcctttccagaatgaacctttctacctgtgcttctactggccatggcctgggcctatgcccagcattattttctgctgccttgtttagtaagtagtctcctttaccagaatgtaagcttgttgagggcactttaatgttcatcttgcactttcccaccctctcagtcaatacccaacagggtaccctgcacacgttagaattcaatatgacaagattacaaactaaagtatgaaatgatgagcttaatctcatgagtgttctttctccttccgcttactaataagtggatatgtgcaaaatttcaaatccctatagtaaaatcacactggttgttttgatcttctttacaaattgcttttgagtcctaagtcatgaatttcaattaaaactttttttaaaacaagactatcgaaattggaaactaaaacaaataactgtttctcttaacccttttctatctgtgtctaattctagtcaacattagagatgaaaatattaaggcaatactgctttatctcaacattaatatgggccctctcattcaaatagactcagaagtactttctaatgtattatacagaaaatcacactggagaaaatattccatgatggtaccattgaggtatcactgcttcctgaggacaacatgtaagctcaatgctgcctaaaagaagctcaaatttctactctgggccttttcaccttcacttctccaccataaaaaaaaaaaaaagaggctaattctctggactattgtgggtcatattttctaggtggtgcaatcttagtgaagagtttagcaatttgcattgggataaccctgtcaaccttcatcattttcagctagaaagaatgaaagctctgataatctaattttttatggtggtttgcactttagctgcctttttttctcaaacctttacttgactactgatcaaaaagtccaggttctgtttctgcttagacaatgtcatagtctaaataaacaggcagcaggcctaggatagaggtgtcaccttctcattggacttcatcctcagactctgcttgaactggacattcatcatgattgaatgtaagtcacatttggtcaaaattcagtgcagatcttagatgtctgacaggggctgaggagaccacttggcttgcttttgtcctaatcttgcctctaatctatgacaaacatcagtggtctggcttagctcatttatatcccatgcttgggtcccattcctgggttgaggtcagagccttgtagaaattacatgcccattatatgattttcttttaaatgcatttgccgaaaatatttcacatggtattagccaattcaggaaaagactcaagaattccagaaaattcccatgtgcattttcatttattccctttctcaacattaaggaagatgtataaaagtatgttgtagtaggaaaagcactgtgtaggattcagtagtctttggttttgatcctgcttctgctcgcagttacatttgccttatgacaagtcagttaactttactggattgtagttgtctcctatgcaaaataagagttggcccaaactagtatttcctaacatgtatttcagaggaaaaagggactgactcaacaagtatatgtgggtcttccctcatgtatggtgataacctgcatccttgtattttaacatgatcatggattctatattgaattaaaagtttctccagcttactgaacatttcacataatatctataaatatttatgtacatctctatgtgtatgtttgtgtgtgtagatatagaaatatagattcagatatggataggaatatgatttagatatctctcccaaggaagacttttcagaccaactcaaaatttctatgattctagttgggggagtcaggtttacaattctaattttcattttgttgaaactcaaattcgaagtttgaatctgcaaaccttcaactttaagtgatatgaaacagacattgaagaataaaagctgaatcgttgcccggggccttacacttgggacttttgattttaaatttctacattattaactttgacaatataagaactgtgcgctatcctcataatgctgtgaaagttgacttcctcaatacatttgtggaggttgtcctttagaacctaactctgaaaccaagtcagctccagtacaatgcactgaagttgggggctgtggctcaactaagtccagagaaccaaaacgtggtgacaaaacagaagcaaattattccaatcatagaaattgaaattgctagtactgtattaagacaccagcatttagtgcattgaggcagaaatctcaagagaatgcaaaattgtgtaacattggagaaacctgcttatgcattgatttccttcaggggttaaataaaattactgtgaaatataagaaaaggaaaaagaactaaattctgaggttttaatcccattacagtattatttgtattgtgtctaagcagaacttattgagaataaagaagatacgaagattacaatagaatgtatgttcttatattgtctaaacagttagaacctaatgaacttactttgtagaataaaaggactttctgaagataagatacattggccatcattaacatattaagagaaacaacctgtataccggatcttgtttgggatgatgtcatcatagctatcaggtcttagctcctatagttagaaagattacagaaagcataggcaagtttaaatatttccatctccccacattaaacacaatgtgagaggtaaatattcattacttggcaataaaatatcatatccatatctggaagaaatattagcaagtatctcatggacgtcattctttcacttaggaagaaagaggagattgcatgtagaattgatatcaaatgatttaggtttaaatgattcaaaggctattattttagtaaaagcattatttcataaacaatatgtgtgtgtgtttgatacatacatatacattcaaatagttaaagcaaagttaattaacttcttaaaactctccaatctttgaataacaaaactcattttggatagcaagagtaaaatttatgttagatggatctaatttttattgatagcaacagtcctgtctcgtgtgtatgagttcctactcaggacacacatgagcaatgagactcactggggaatgcaaatgaaacacttgcaaatcaaatgttcaaagcacatttttgctgagcacccattaactcaatttcatatcaaaagcttacccattttatatcataataaaccacccgggttcacccccacacctcctaactaatgagggacacacagatattctcttcacaaatcaagatactctttcataggatgaaatcactaatgacattaaggtgtggtaaccaacatgaacttgacaaccaaataccaacccatattatcaccccataggagagagtcctaactccccaccttagaaaaatatttaacccacaaaatactaaacccaagtagatttcaaatagaaagataatggtacaatatcccttcccttctaatatcaaatatctagataaaccaaaatgaactgtccagccactaggatgctctatgccaaacatgcatattttaaaacttttactttgagtattaaggcttcttaacttctgcagcatctgtatctacttctaaaccagacctgcccaacagcacagactggagcgaccactttaccttccgaaaaatcaatcagtcccagcaaatgaagaagcttcagagatgcacatataatcacaacaatacccactgtttgcagtccttcggactcccactccagagtcaacatcctctgagctggcagagcatcccagcctccagacccctttggagtggagggagttaattacagaatcgtagcaacgtcaggcttggaacaaagacttgcaaggggaaaaagtgagcagctcctggcagatgcaccctgcaaagccggcggccccccggggtgaggacagacctgggctaaagtccagcttctcatgctgatcctggcatttggctggcggggcttcccccctgctaccacagcgcacggacctctccactctatgctgcagccagcgggcgagtacttcgacttcagagctgcgagggaaacgtctgtcggagaactggagactttgcagtgtccgtggcgagaagggacactcctaggaaacttgcccgggagaacaccgcgcgcttccctcgctgaggacgcgaggctgggcagatctgtctgcgcgctagttttctgcctgagaagcttgcgaatggcccctttttgccaaagctgctgctctctcctcccagagccgcctctggcagagagctcagctccctctctgaatgctaggaaacaatcagttctggtggctggtgcctacaggcccttcctgaaagcccccgtggaagtctagaggcagcttttccagggagaaaagtgcaggagcaaagctccgtgattcaatgactttgtcaaacgagaacacctgagcctcccccgccacgccactccttgttctggtctccgctgtcacgtcgggcgcattatcagggagattgatttagtccttatattatatttacaaaggtggacggagggcgtggcggagcagtacccggtaacaactaagatgttcataactgccccctggaaggtgtgtaccaccatcgtcctttaaagtctggcctcagcctttctcaaagtttcacaaacttccctgatgataaaaacaacctggggttgtttattaaaaccacgctcatcagaggagcctggagtgtgtgttattaagaagcccaggtgactcttatcaactgggaagtgtggacagcaccatcgcaaagatgccatgaggtgtgctagtccaaaccactccaaacagaccctgttctgtgccaggaccacactggctgaatcactttgttggttatctccagtctactgaagcccaacctaaaaacggagatgaagagaatcaacagggactctgtaggtgaactggaaatataagggtttgtgagtaatatctcagacctccagggtcatttgcaagttctgcttctttcttgctatgtgatcttgtgcaagacacttaaccactctaataacaggtcctattctatgcagtcaagatcataatacttcatttaaagttctccatttaaagggaattatgggaattaaatgtgatcacaataatagttaacatgtactaagcacttactatgtgctcatcaatattgtagtgacttttcaacaacttacttatccctacatctctacgtggtagacaaattaatctaccacataagtggcagattataagttaattctaatcattttaactttgtaggtgaggaaaacaaagcatgaagaggttaactgacttgccaagcagtgggcatagtgactggaaggcaacaggctttcattcattcagttattcattagcatttattaagctgctactatgagctataaatggtacatgaatgatcaaatgatgaataatactcagctctgtcttttgggggcttatagtttaatgaggaggcaggcatgaagtaaaatgtgaccaataaatacaccaacacttgaacagatgtctgcgcggtacagtgggaaaacaaggagggaaagtcaactctaattgggaaagggtttagtggtatcaggaaggagactttatagaggcggtaactgtccataatggtaacctgaatcattactagaagtattatagtataccatgctcaagttttgaggttggtagacctgggtacaatcctagccttacccttgcttgctccatgaccttgaagaatacactccgtctctgaatcttggtttaaaatgggaatgctactgcccctttctcatggttgatgtaagaattaactaagtctgcggggagctgagcccagtccctggggtcccctgctcacatatggtagttgtggggttatgacggaagttccaactcttcagaggctctgcaaggtctccttggatgaaacgactttgcttttccctggtcctgccacccctgctccaaggtctagtttcagcgtttttcccatgaagacctgctgatcatctcaacccacagtgtggtttctttcccttgagtcctagaaataagttggtcctgccaaaggtgcttttcattttgaataacatatttataagagatatccttgtatccacctgcccaatcacccatccatccaaacattttcttctccattatatcagcaagcctgtggcggggaagcaggttttagtaattagtaggaaaaaaaatattttaggtaaccattttctgaaatttccaccaacgtttagctacagaaagtcaaaagttaaaaaaaaattacagaaattaattaggtcaagttaaatgtaaacatgtcttttaatcctatatcataccatattgtagttgaaaacaactaaagtactgagagggggtcacatggttagaaaacccagaattcaatcattgctttgtctggcttccaaattcacgcttttccctttatttctatcagcagatttcagcaaatatttgccaattgatctcttagtttagagagttggtaaagtattttaaaattgccacatctcattttccaggattgaaattcctatcttttttgaaattcacataaagtcccatgaatatgattttgttggtttcagatagaatttcccttcaggacaatagcattctctacttagaatgtgccagctgattggaggtccagccctttcctatctgcattagttacatttaccacatgctttctgagctgtctctcagctgtggctaccggatcgaatctgctggctcccaagtatgcgggggctctttcacatgcacccccagctgtgagattttgtaaggtgacagcaccataagaggagtttcctgcttcatctaaaaagtctagggaagcaggggacatctggggaatgatgtttatctagcgccactcttggaaagaagagttgcctgcatagcgctttgggaggcttaggtgggaggataacttaggagtttgagaccagtctggggaacatagtgagactctacctctatttttaatgtttaaaaatttaaaaaagtaactccagatcacggctcaaccattttactgcagtaacttgctagccccaacccagtttgttatattaaaacatcctggctttctccctcattcactgactcacccctttctttacattgtaatgagtcctccagcagaggtctgtctttcataccaaagaagggaataccaaaggtacactaaaggcttttacccattgattctaagccaggcaccatactatgtagtttacatgtataaattagtttcagctcaccccaaatcaataggttaggtgttattatcactatttcaaagaagaataaaaactaaggcgcattgggattaattaattttcacaaaattacattcaacaagggacataaccaggatttatacctgatttactccaaaaatagtagctaccaacatttatggagaacttttaagtgtcaggcactactctaaaatatttatagatattggccgggcgcggtggctcatgcctgtaatcccagcattttgggaggccgaggcaggcggatcacgaggtcaggagattgagaccatactggctaacacggtgaaaccccgtctctactaaaaatccaaaaaaaattagccgggcgtggtggtgggcgcctgtagtcccagctattcgggaggctgaggcaggagtacctcgtgaacccgggagacggagcttgcagtgagccgagatcgcaccactgcactccagcctgggcgacacggcgagattccatctcaaaaaaaaaaaaaaaaaaaaaattatagatattaactaatttaatccttttatagttccctgaaataatttggtttcaaggagaaaattcaggctttcaaaggttaatccacttgcctgaagcctcatatatggcacttggtagaactgggatttgaatgtgggtatactcggtaccaggttctgcctactttatcattcaccacctcactctcaggcccctctgcaccatgttgaatggttctttaactggggccgtttaactggttgagagactctgaaaggaaagtattgacagaaactcttaggaaagtaaaaactcactccaaggacgcatgtccaaatcaattgaccagtctgtgaaagagagagggtcagtagactttacatttccttgccccaatccattgtgatcctttaaataatctcaaatgggatgatttatctaaaacctgaaattgatcatttttccttgttttttatagcttcagtttgaaatttcaccacgtgatagtctcggttaagaaatattcttcatactgtttgttgacattataataaatgcaaaaataagtgtagcaagattgagaaaaacgttaaaattcgatatatttacaatctacctgttctctcttcaaatacatagaatcacaatgtatatagaaactagttaagtcaaatttaaatgtaagattattagcctatgaagggaatcagaaaatgttactccaaaatatgtcctttggcataagggttattttcgattgaaggcaactgaaataggagactcaggaaaaactctctaccttccccctctctgcctcaaggcaggggatagatgtatgaatttctctttgtaaagtattcccttctgctctcctgtatgagaaggatgaaacaactataatcactgggcagaaagtcggcaccagtgggatttgtgtaagaaaccttacaaataagccttatattccattagtttcccctgtatatttttcttcccacaatttaccaccctagaagcccaaatccttttttctttgtcttgtcacttcacaatttatcaccctttgttaggatgattatataagtccccaattctaagcacccctttgagttactcttcattgagttctcacatgtatatgtgctctgcacgtgtaaataaactctattaatctatttttcccatcaatctgtcctttgtcagtttaatttacagggtccaactactaaatctaagaaggaacagagaaagtttttttcacccctacatccatattcatacaatcttttaggaatcatttaaagataaaataatatattttttaaaaatttgcaaatgcataaaaaggaggtatagagagcagagttggcttgtttaaggtcagggacttggaagtggacacaggtggctttgaatcctctagcttttcataatccttgacttgcttagtataggaaaaatcaggatgatacactgaaaagttaaaaagaagtaaaattctagaaggaaaatttcttctctcagtcaatagaagctaagagaagcaagccatcaggatggttggcattatccggaaggttgcattgaagagagaaacctaatctaggtcattgaaaatgagtttggagaggagcagtgactttcccaggaacataaatgggcacacacaaagacagcattggccaggcactgtgactcatgcctgtaatcctagcactttgggaggttgaggtgggtagatcgcttgagttcacaagttcaagaccagcccgggcaacatggagaaaccctatctctacaaaaattgcaaaagttagctcggcatggtgacatgggcctgtagtctcagctacttggggagctgaggtgggaggattgcttgaacctaagaggcagaggctgcccgtgccactgcactccagcctgggcaacagaatgagaccctgtctcaaaaacaaaacaaaaacaaaacaaaagacagcattcacgacagtggtaaagccagattgagacctccaagccaggcgagaaaaatgagattggatagttggtgaaagatgccacttaacatcaggacttgatggggcaagtaacaaagacaaggtcagtgtatgacccttcatgtctcttcacactgtaagattttctcaccaaaatgatgaaagttatctacccgcaggtgccctctactctaccctcaacatcacctccacattaaagtatatcaagcctttctatcttggggtttctcaattactttgaaaattcctaaatgttctccagatgaactttctgctcaaacatgatcagactcaagcagtttcacttagctgaaggctcattctgaaaggttagtaaatgtgtcttgaatggacttctttaaaatatgtatatggatgtccattaaactattaagtaccacagccttctgttttgaatgccctattgaatccacaaggtcgattggattttcaaatagaaagctgagggaaaaaactaccttccatcctaagacacttccagcaatattgcactaatgtatcttgaaaatagtcctcatgaatcttatgatcaaagcatgtatagtatgtaatcttcacataaacaaatgagtagactatttggaagtccaaccagaaaacttgcattagaatataagctttccttagtaggatttatgacatttttgccataatttctttttcccagcctttgtggcctaacctgaatgagttcctgggtttacccatttaatccagtatgcaatttgtggctctcctgtcatatcccttttgatgtaatctctctgtaataggtgtctgtcacatcccaccacactgggctggctttaaggccgtgattctccaggataataatgatcattatcccttttatatattatagtttgtagtacaataatactgaattcctaccacgtgacacacagtgtgctgtgtgcattacataaactgtctcattgagttgtcgcaatatctcaatagaataactaatcattaaccccattatatagatcagaatgctgagatgcaaaagcttaagtaacttgcccaaaactacagtgttagcagttgaggagctgggacttgacttcaagaattctcactcaagagccagggttcttacattggaggggaagtatgtgtcaaagtcatcatttttgttttgttttattttattttttactgtggccccattacacaaagagacacaagatttaaaatgcgaatgaccttcagaaaagtaggatgtgacgttaacctcatagtgaagtgtaaatattcagtaactagttctttcctgggaacaaggttaagagagcaatgaaaacacaaatgagatgagggaaggagctcgggatagaggtgagaggaaggagaaaagatgaagggaagggagaagagaggaagaaaagggaaagcgagaaatgagaaagagaagaaacaggcaattctttactccaggcactgagaaatctgaggatacatagatgaatggggcctgtgttctgtttgtgagattctcatagatggccagggagacgtgatctaaaatgaataaaagagggctccaggaaagggccgatcaaggggctatttctccttcaattaatcctacctccgtggtccaccagtctatgcgtctcttataactagaaatacagaatatctcatcagcttcattttctcagccacagcttcagatgaccttggaaatggaacaagtggttttaaaagtatgacaaatggcatctccatggatgttgtagccatggctggggcttggtcctacttctaggtctgttcctaggccctgtcataccttcctgctcatttgggccagggccttgctgccatagatataccacttcatcagcttgatcctcccagttcttgggcacgagattccagagactgacttgggtgtcctcagagctgcgtaagctcatttcttgcaccacaacagtacttgggaaacagaacccagcaggctttggcttaaatgctttccaattctgaagagaaactgaatgaatatttttagcatattttgttgtataggagttgtagagactgtgttagtccgttctcatactactatgaagaaatactcgagactgggtaatttatgaaggaaagaggtttacttgactcacacttcctcattgctggggaaattcccatggcctcaggaaatttacaattatggcagagggcaaaggagaagcaggcactttcttcacagggtggcaggatggagtgggtgcaagcaggggaaatgtccgtcacttgtaaaaccatcacatttcatgagaactcactcattatcatgagaacagcatgggggaaaccacttctatgatccaattacctccacctggtcccgcccttgacatgtggggattatggaaattatggggattacaattcaagatgagattttgggtgggaacacagccaaaccatatcaagattatatggaaagaatatttcatatagttcccaaaactctcctccccaaataattccatgtgctttctcctgtctccctccctttctgcctctcccccaccccacatacaattatcacccggatcggatcattttccttatctatgagattagaatgggtgaagtctcaatgacttggaaatccccttttcaccaaccttagagccctgaacattctcaatggatgatgaacaaagaaagcacagagtaggccgaacatggtggctcatgcctgtaatcccagcaatttggggggccaaggcaggtggatcatctgaagtcagtagttcaagaccagcctggccaacatagtgaaaccctgtctctactaaaaatacaaaaatcagccgggcgcggcggtgggcacctgtaatcccagctactctggaggctgaggcaggagaatcacttgaacctggggagtggaggttgcagtgagccgagatcatgccactgcactccagcacaggcgacagagtgagactccatctcaaaaaaaaaaaaaaaaaaaaaaaagagagcacagaataaatgtttagagaatgcctaccagaatgcagggcatgggtcatggtaggccttcactctctaagggctacctatctgaggtcatggcacaggactgggagccagacatgtagcctggtttttggaccattagtccagttctctttccactgcaacagggtatgaagatgtctatataatagctaagttacaagcaaaaagggaatatgcactatagaagagatttcttatagtgagaagatcaggaaaatcccagagaaagagaagacatatgaactggtcatgaaggccaggattaatatgacctgtgtccatattactgttcatgaatgcaaactcttgctagtgctccctaaatcagaagcatctatgaatagcttccaagattcattgtaacccagcaatcagtgaagctaggggtcacatcccaatgaatcactttgacaaaagggactaagccctcttaaaagaagtagaggaagaagaaaagtttcccctacctcagcttcaaatacagaggcccagagaactggaaacaaaatcattcttctgggaatgagttttcctagaactcacagtcagtgttgcagcttatgtgcctgagattgcttattttctgttattgtacccattactataatgctgaaatcagtttgtatttgtttcccgttgctgctatagtaaattaccacaagcctggtggctaaaactgacacaaatttattatgttacggttctggaagtcagaagtttgaaatggttctcattgggcttaaatcaaggtgttggcaggaccacgttcctattggaggatctaggagggaatcaattttcttgccttttccagcttctagaggctgcctgcatatcttggcttgtggccccttccattgttagtgccagcaatgaccatttgagtctttctcacattccattgctctgacactgacccatctacctccctctttcttttatccttgtgattacattgggcccacctaaataatccaccatacaattcttattttaaggacatctgatgagcaaccttaatttcattcacaatactgattaccttgtgtcacataacccaaaataacacaaatttactatttcacaattcctgggtttaggatatggccatctttggggtttttattctgcctactatatagatgtaatatattagttatttttaacaggaaacactctttaagaagaaaaaagataacataaactgaagctcacgaagacagagtccactttattaggaacaaactagttgaggtaagtgcatgtgagtgtgagaatgagtgtgtgtgttttatttttaacatacagaaaaagaactttgtctttgagaaggaaagggcagctttaattagcattcctatttctgaactaattgtcacagagaaaggactttgaggaaagtacatttcaaaatattaaaaagggaacactaaacaatttagagtgtataaactaatgatcagaccgagggacactctcctttcattttaggtgcaagcccagacatgaactaggagttacagggatagaaccctacagtacccagaactgggatgtgttcttcccacaaagaatgtcctagaggattacaaaagaaaagagaggagaaactactgcataagtagagaaaggcattcgcatgttatcagtcccatcagctaattcagccttcttaggatggataaaaccaaaaatgaactaaactcttcagctactgagtttttcatttttagttcaagtgtgcaatgctctgaacatgagaaagccatagagcatgactttcaaagacatggtagcaattaaactctaggaaatggggggctttatcctttgaagagccataagacactttctcctaacactgcctttaaatgtgcttgcatcttatacatttcagttaaaaatcagctctaaccccttctgaatgtctacttttattcatgattttcctggagtaagtttacctatatttacacttttccaggctttctctcacttgttctttaccgtaggctattttaaaatgagaaaactgagactaaaaaggtttgcatgatctgaaatcaaaaatggctgcaaaacagggttaaaaacaggcattctggctccatgccaattttagattttttttcttttctagtcttatagagatctttttctctgttgggtgctgtgggaagtgctttatatcagcgacttataaaatggggataataaaagcatctatctcacagtgctgtcaggggcaatgaatgcgttaatgtagttaaagcattcattgcaggcacaaagcaaacactctgtttctaaaagtaattatttttttagtagccatctctgaggtatttcgattattatgcccatttgaccaataaactgtgatccagaatggttaagacacttgttacaaagctggtaagtgaagctggaactcagtcctgctatgagaacccgttcccatttgcacaagccacactcacattgcctctctggtttcaaagaaccactctcagtcactcagctagttcttggcttccaagcaaggcagagcctaaactaactgagctgtattattatacttcatctgtttgacaagatcctcagatttcgatgccatcgctcagtaatctcttctttatctgaggactttgacctttgcataatttccacctcactgcatttgtgcaaaaaaatgttgacaccggttatgtaccatgcaaaatatgcaagggactgtggggcatgaagggtgtgaggaagcttacagcccagaagaaaagggaaggaatgcacataagttactaagtccaaggaaaaacattagtgtccatgagaaaatgcgtttaaagtgtggtaggatttcaggggcaggagaggagtaagaaagtggaagggtgatgttagtcagggagtgttgcatggagtctgagcttgaccatgagtggcagctcaatcattcctttaatgagtcaattaacaacacttatgtctgctatatgctagaatatgcaagaccctaaacaaatccaatcaacaaatcccattggttccacctccaaagtacattctgtatctgaccaattctcactaaccctgctaacatagccgtaggcccaagccaccactcagcaaactcctgtctaattttgttactttcgctctcacacccctaaggtctatttttacacagcagccagattaaagagcatatctttcatataatttccctgcttacagtccctcaatagctgtccattatattcgggataacattcaaacttctcgctgtgttttgagtcctcttggatctcaattcagaccaatgtaatcctgtcccacacctcctcatcacagttctctgcccacatagtctttcgatttattaaataaactaagactatccctgccactggtctttgtactttgtgatccccatgtgatgttctttaccccaagattgtccccttatttcttagactgtctccttattcttttctctttcttgccactcacttctaggctcaaatgctgtcttctcagagaggcctttcctgaccacactatcagaaggattctgtgtttttgtcaccactccctggttcctcttgatcaaattgctgtttttttatttaattttctccgtagcactcaccaacctccctgaacttcttttttttaaatgcctcttagcacgttcatttcctatctcatcccacttgtgtagatgctcctcacatgtgggccctttaccgacctcattcatctcactgtctccaggaactaggagagagattgtcagttacaggctttctataatgatttgttgaatgaatgatggcataagacagggttctttcctcacgcaggcatttgaatctcatgaagtgcatcagcaaaatcataatcagagactggcaagtaattttattaagtagtgcagtgggttcaagggagaattcattagactaggatggggggaaaactacgaagacctgcaaatatctataagagagtggaatgaggaagatttaatgatcatttcaggcagttgacaggcatgatcatggcagtatctggtccgtttcatctggtaatagcgcaaataaaagcaaccacaaccatgaaagaaaagagaaaggaaacaagagacaggaaaaccagtgagtaggctgttgtaatggtctataccagatgtcctatcagtgggcagaaagggactggacacagaaaccagcaaagctgcaaagctgaacccagcagagcatggtagcgtatgtgaaggctgaggcttcacatgtcctcagaggctgaggacaggaggtatcaaaggtgatcttaactgatggtgaaacatgttggacgtattcttcaacatttcactggctctgactagtgaaataattaaaaggtattgtagggaatctgggataactcattaacacgaagaaagaactgcacaaccaagacttaggaagggctgggaaagaggacgctgtgaatgacctgcagcaggaacttgctgacctctacctgagagggctgcccttagcatgcttctctctgggtgttcttgaccatggcatctacccaactcccagtcttcaagtttcaaacatcaacgaggaagattctgtatgtaggtcagacgaatgccgttggatcaatctgttattgtctggatcaatctattattgccaagtacaaaagagcactagggacccgctcctaatgactggggtccttttaggacaaagaaaactcttgaagggccatacagctgcttcaagtcacctcgggtgaaattgaaaacaggaacgtgtagagaggtgaagataattgaatttttgataaagttgttcttgagaaaccatcaggtaatccaggtagagctgttaagctgataacttaaaatgtggagctatgccttgggaagagggccagagtgagagagaagataatctgggattcatccacataaaggagataattgaagtgacagtagtgaatgagatattcagggaagagagatagaaagagaaaagagcaaataatcaaccttccagaagaaagggtagccaacagtgccagagcaggattagtaagtgagatgtaaggagaacctagaaagtaatgtttcatgggagtcaagagaagagagagcatcagagacgctggatcattgagttcactgtagaagccctatcaatcccaagtgaaagtttcgtcccagcaccaattagctttaggcaagtgtgtgtacaggggccatttctatgtgtgtgtacatgtccagaggactgaagggcaggggtggaatataaaagataatagttaaaaagatttcaaccataacatgtgatctacaataaaagtctatagccacactattgattacctataagggaaaacttccataaggcaactagactttgcttttacattattttgacaaggttcatgaatagataagagaaagtagatctgaggtccattggtctactgaagttgtcttcaagtctgaaagagtgaagggctgaaattttaattcacatctcattccttttaatagtctggcttaaaaataagaaaacacttgtctcttcatcagtggcagaagatgaggacagggtcatagatctgaataaggataatagttctttgcaaagaagtactccaaatggaggatgactcaatgtcttgacaccagtgagaataaattgcacagtcggtgcacttaattgtaaagttcttatgcttttttattcaatccaagacaattcaacaagtattattgagcatccagtaagtgcccaacattgatgcaggagttgggaatatgataggtacaaatgagccagctcttctttcttggagcctacagtcaaatgggaaatgcagaaaaataaagaggcagttattaaatattatagtgagagcaaaggtggtttcatcctgggagctcatttcacagacacttaactcactcttcattctagacaggttttctgacaaaaagacatcatctgaacagagctcttaagtatgagcagggtcagacaaagataggaaaaatctgttacttatagagcaaacagtggtttcaacagcttggaacctagagggagatcatacttcatcttagacataggcaagagctcagtttcctgagtgagtgtgtttgggtaggaataacacaaagttgatgaattagacaggaataaatcatatttcaagatacagggctattaacgtaaacaggacacagatcacgaagggtctttagagcacccaaaaaagagggtttttgttgtggtggtgttttttttttttgtttgttttttgttttttttttttttttttatcttgagagcatgagagagccactaaaaggctataaacagaggcacacagcatcaaatgtgtccttcagaacgatcaccgtggttgctgtgtggacaagtgattgagggtttgggggaagagggtggctggtctaaaggtaaagggactaattaagaggctgtttcagaaattcagggacagatgatttaggaatgtggcaaactgactggagagacttgaatggatgtgacagatacagacgtgatgaaatctatagatattgaaaaccaatgaaccactagggctggagaggaaaagagtacaagatgatattcaagttttcagaaaaaaaaataccatttctagttgaaaattaagaggttatttgcaaaactaattacagtataaaagactaacaaagtgtgcaaagctctgaaacaagaaggaaacagaacatgcacgttgcaacttagaattttctggtagaggcaacttaaccttcccagagtattcatctccacgtttggggcatccagccattgccaaggaagggcggaaaaaaaagaattgagaatatgtgccatgtgagtgtttgttcatgaccatttaaaatcagatgcttctgcagtgtagacccttcctacgtcccttgtcttagaatggtgaattttccaggtaggcatataccatcgattccagcaggtgctaagcagaaggatctgcagctaacatgcaaatgattagcaaaaaatttggctaattctcagtaccactgccaactccagaccaaaaccaccatcctctccttcatgactcctctaataagtcgtctcagccgctgcccttgtctccccatattctattctacagaaaaaaaagatagagtaatattttaaagcatagatcaagtcatgtgactcctctgctcaaaaccttccaatagatcttactaaaaaaagaaaaaaaaaagacacggtggctcacgcctgtaatcccaacattttgggaggccgaggcaggcagatcacatgaggtcaggagttcgagaccagcctggccaacatggtggaaccctgtctctactaaaaatacaaaaattagccaggtgtggtggtgcatgcctgtaatcccagctactagggaggctgaggcaggagaatgacttgaacccgggaggtggaggttgcagtgagccaagatcgcgctgttgcactccagcctgtgcaaaaagaacataacttcgtctcaaagaagaaaaaaaaaaagataaaatcccatttaaaatggggtatgtgccttttatgataactctttgattttttgtctcactacacaccccttactcactccagctacagcggtctccactatgtgccttgatcatacagacatgcttctatctcagggatattgcacttgcagtttcctcttcctagaccttagtaagtacagcagctaccttctctcaaattacatgcttccactcccaattcttcctcacctcttccaaacccttttatactttttagcaattaccactatcatataaactacatattgtttttatttatcttgtttttcccactaggctctaaacactattaggcagaatttttaccagctttattcatgattcccagcactgagaacagatttgacatgtagtaggaggttgataatgagttaatgaatgttgctgaaatatctaccgaaagcaacaaacatttaccttcatgaatacacatggtttccccttaattaacatacatagatacaatacatcacccttaaatattttgtattgttatgttaatagagaaaaaagttcaatttccccttgggagaaaacactatgaaattgcttaattgcttatgaagaaactgaaaatgtaataagtaactaaagttctaaaaaaatttgagtgaccacaaaacccctttaacctgccctccaagtgggtcctgaaatggaaagctcttaatgtttatttgggtgataagatggatttggccagttcattttggatttgaactgggcgaggctgaattgccctgcctaatagaggaaggtgggatttgaagtggcctacctcctcctgtttcctgggtggagctgacttggttctgtggatgaaaaaagggatgaaaatgaagaaacaggaaccagagaatgcactctccttaagcaatgacaacagtaatttattgagtgcctactctgttaaagatacggtagcagagtcctcacatatattatcccacttaactgtcacaaggactctgttaggtgtatattatctgcacttagcagataaggaaattgagagaagttcaaagtgctttcgtttttgcacacaatttattggtgctgggattgaatctaatctgactgctgtaagaccctctttctccaccaaatgacgtttatttgttcttggaacctctcgttccttctcaccacaaagtagaaggcatttttcttcagaaataactttaggaataataattttgtttccagtaagttcattaaaaccctttgtaacttataatacagttgaaaggccaacattgtttctaggaaatgtgagctgggagctttaaactgcagacttaacaagtcaactttgttatagtctgtttccctcttcttagaggagataaataggcagcactgttcaattactcaaactcattctgtgtttcatctttccagatagcatttagccttgctttattttttcccaccattgaagtacaaaagctgcctggtttttcactgcacaaagtaaatgatgagcccggagccaatttctcatctcagacactgcagttttcaatgtgcattctgaaagctttgaatatgactataaacacatcaaccaaaacaaactgtaatttttataaaataagcctcagagtatgttttgctgaaacttaacaccttttgtctaagggaaaaagcagaaaaggcagtaagagcagaatactcgtactccattcactggcagtgctgaatcccatgtaaaatctggtagtgcataatcaagacatatggcctcatctttctttgccacttcccaggagtgaggtgtttaagaaaactgagaactcttcctggccaattcagaacggggttgtctgcagcaatgctgttcgaagtgtggcatcagcaatacgtgggagagtgttaaaaatgcaaattctcgggcccaccccagacctactcaatcagaatctctggggtgggtgcagcaatctgttttacaagtactctggatgattgcgatgcaagctcaagtttgggaagtataaactaaagggaaggaattccacctgaacgcagaacaatgggattcaagtcactggaacatcaattgacagagaattattctgagataagtcctttaacctctctggcttctgtgtttcttatctttaaataaagaaattgaaacattttaaccctggatcacatcttaacctattatcagagcatatcatggttacctgacactggtataaacatccctcacataatgaaagatttgagtatcattttctgactgctcttattttttctagctagcatcataatgacaatcacagcaacaacatcatgggagggcctcctgtgttcgtgtaccatttcccaagtttaacacgtttgatctgctgatgtcctctagtagtaatatctccagtttaggactgaggaaacagagcttatgtcacttcctgaaggtcacaaagaaagtaaattacagggctgaaatttgaacccacatctgatttcaaaatctgctcctccctttctaccaacgtctatcttcccggaactggtaactttcattaatgagaggaagaaaacaaaacaaaacaacacaatccataaggtggggctaagcagacctcatttctgtgaacagtgtgattccttgaagtatgtaaggcaattactttgaatacatttaacacacgtattgatttcatataaaagccactttacctaagagtgatcaataaacaacaaagcttacttgtagttgtactaaactgctgatttattgacaactctgagatattttgtccctggtgaaaagacacaaaaaatagaaactggagagaactttggaaagcttctgccttaaagaggttaccataggcaaaaggaaatttagaactagagaagcctagcaatttatttaaggtcacatggctggttagtggcagaaatatggttggaatgtatcttactgcccacctgagttggggttattgctgatattattttattaagtgaaactggatattgtttcagaggaagcttataaagaagtgtggtagtgcagattcttcaatgataagccagaattactcacaccaataaagttaagatgctaattctgggcagaggcaacagcctaaagcaaaggtatggggggtctggaatcgcatgatgtgtttggggaacgattagaaattccatattactaaaaaatgaaaaagtacaaaccaggaagcagttggaaatgagcctgagaggtatggagtattgaggttatgaaggactgaatatgtcatcccaaggcatttgatgttcataaggggttgctaaagaattggtgcaggagaatggcatgaatagatttgtattttagcttgctttggctatagtatggatttaaggggtgaggaaaggaggaagatacagcatccaagactaaaaaagtgagatgagttgggcttataatattccaggcagcaaatggtaaagtctgtgcaatgtcaattttacaagcaatgaagtagaagaggaagactcaaaagattttttgagaggtaaaataaccacaactcagtgctcgattcaatgagaaaggagagagtatatgggcgactcccaaatttctaacttggacaactgatgaatggtgatgacatagggagaccaaagaggaatacattgggccaagtggaaatagtaaaactagtattgagttcactgtatccctgcaccatcgctgtcaagatatcctggagagacagtccacacagaggtgatggtccataccattgcaatgtgtgagactccccaaggcaaaagagtaacacagtcaaggtgagagtcttggagaatgttacagaagaggaggagcctacaacaattactgtgggagagaacaaaggagttggaagcagagagggaaagccttgtgtcaaaagccaaaaataattttctttttcacacttcatgaattataattagcttcaaattcatagagttccacggaagtcaaaagtgacttcatttttgcaatatgggtgtcactggtacagaagatcagtaaggatggaaatgcaatcacatggagacgttagctgcagaattgaaacaggtgtgtttctgttttacgggattcaaaaatgctaaaggggagaggacaggacataggaacaaagtggtgcaagcatgacatataaacatattgaggagcaagcagagaggaagaagtgaatgtagggagagaggagacaagtgatagaacatctctgaatgtggagggaccaataaggtgttatttggctttggcttagaaaaactgagactcatgtgaatagcaaaagtatagaccttttcatataaaatattgtactattacgggagttaatgcttatatgacaggccagaggttccttgtaaaaacaaacaaacaaacaaacaaaaacccaataaaaacaggggttcccagattataatgttagctgcagatcagatgtttggaaaggccacgagtttcccctgacatccacctggtcacatggagtggctcagtacacaggcagagctggccacgtgttttccctgctttggtaagccagttacctgcttctcaaataatcaggagaatataatctttggcagtgtgggtatcatgcagataaaactaacaagtaatcattggggccttctcactttttcccacttattgaagttttttctgaataaataccaaaaagcctaatcatagaaagctttaattggctcaattctaattaatatacagatgattaagataatttatatttcatatttatttattacgtgaacttccttaaaacacagtatctatctaccatttttttttctacatataacctgcctgagaactcagaccaaatgagttcccaaattatgctggacagtaggacaagtttgatgaatttcaccataaatatggtttggcacaactttatttgaaaatagaattatagaatttaagaggcctcatatccggaatgcttatatagtttgaatgcagagtgactttggttatagtgaaggaggaaggacaggccctcagttaggtgtctcaaataccttcttatttaattacagcagcatctctaccagagagtattacgcaattatttttatcctaaaacatactctttcccctgacatttgcattttttctgaaatttgcatgcaaactttggttgatctactcattaaaaataatgtttattcttcgcacctcatgcccttaaaagtatttatgtcaataggagagcaatagagagccttaaaatggaggcgattgaagcacagagagactacgcatctcaacaaggtacacaaaccagaattagtagagccagaatttgaactcacgtctatctaacttgaaagctggttaagagcaaatctttgctatgtagatgaaggcactatgctgggtcctgataaggcagcacctgcccttaagaaacctgcatgcagaggaggaaatggacactaaagaataaacaagtagataagagaaatttagatgctccataaattctacaaaggaaataaaacagggtaaggtaatagaggcagattggggagttgcttcttgctgtcctcttccaagaggtaacttttgaatttcttcccattcttgtaaaattgggcaacagcacataccatgtaaaagaagaggacttgcataagccgtaagatagaaagaaacttgcttttgaccaactgtaaatcagacattgccactcctcattgtaagctctaggtgtctctttttaagggaccataatctactggggaaaacagataagccaaattatatatgatgttgttatacatcaagagctataatggagatgtgttcaagattctacagaagcatggaagaatggaaatttgctgtcggtagaatgagtgtttcagaagtaaagatgggagttaagttggtcttgaagaaataggattttgcccaggacatggggcagggaatgggtaagtgcatgccgtgcctgggagatgtgtctgtgtcatgtaacacagcatggaagtctgatgaaggatggcattggcagttgtattgtcatggcggacctaacttggggtgcagaatggggcatgacaggggatgttctgaacaagatgtagcacctggaaataattaagcttggcaaggtctcacaataaattctctctgttcttgaggacaaatgtcactgaaaatacttcaagtgaatttcctggcagtgcctggctgactttccaaggtctcttgctgaataatgtagagggaacactgtttgagtcagtggttctcagtagaatcaccagtagaacttaaaataatatgaacacaaatttaaaactttaaaaaaatacccttgaataattaaaatcagcaggtctgggaatggggattgcacattggtgatttttaaagatcttcaagtgaatgtaatagtcatccagcgttgaaaggcactatttctagaagacttggaagggaaactgagttttcctgaaggcctgagacaccgtatatggcggaacctgtacagaaagaagtcatccaagaaaagacaaggaactgacagggactgatcttaggactggcagtgtccatgttccagggtttagaaaaactcattttttaaactgttgtgtttacatagtagatgtatatatttatggagtatatgggatatttagatagactattgtcaccctgtcatgctttcaaaaactagatcttattcattctttccaagtttttttgtacccattaaaccatcttctctactctgcccccgacccacccagcaacttcccttcccagcctctggtagccatctttttactttagagaaagtcattctgaaagcaaagcaagtgaaagaaatgtaatctttaggcaaccaagctctgaagtctaatggtgagatccgaatttaatggcgctctgaatactcctcagtaattatctcagaagaaaacaatggcgccaaagggaagccctgattttgaacagtcccaggtgacagtaaatgagaagtaatctgactaagaaaccaacggagagtcatcccttgactttcttttccataatgacacctgaagcacacttgtttattctgtaaactttagttaaacaaatttaccctccaagacactgggggtttgccagagaacagttagtttaattggagctcatctgtttttgttcctaatgagcctcccatttcatagcctgctcctagtttgaaataaaatgtcccccctgtctgggatgattaaaaacctggttaagcatacaatatacagtagctgccaaaatgtttccaccaggcaatactgctcagaactgagacctgcaggcaggattagaagagagaaatctgttgattttttccagctcaaaaacaaacaagcaaagaaatcacatccaattatctgagttatattttattaaagaatccaccggagaactgcattcacttctcaagatttgctaccaaaccgtctccccattctgtcttttaaacactcctccaccctttttgttctctagttggtttgtaatttagaaagtgtgataaacaattttggggagccattaagttttaccagtgtttctgtctgaaattaggctactatgtttgccaaagagctgctctgtgctataaaatctttattaaaaatacaattatttacaaaattattaatacttatggattagaataaatgtgacttcatcttgcagctatgggcattttctttttgtttttgtttttgtttttttttgagacggagtctcgctctgtcgcccaggttggagtgcagtggtgcgatctcggctcactgcaagctccgcctcccgggttcacgccattctcctgcctcagcctcccaagtagctgggactgcaggcgcccgccaccacgcccggctaatttttttgcatttttagtagagacggggtttcaccgtgttatctaggatggtctcgatctcctgatctggtgatccgcccgcctcggcctcccagagtgctaggattacagacgtgagccaccgcgcccagccgggattttctttttaagaaactgtaaggtgctaatcattgggtatttcattaggagacacatttaaaaaatctgattctccaagcactttgttcttagactcccacatccctttcaccctcccccaaattcaggatcacaggatttcttctgtctgccttatgtattttgcaagctaactattgcactagaaaaaaaatatctttcacaaataatacagaggcagatgttttctggatcataatgatcaaatagagtgagctaaattgctcattgatctgtgattccttgtcatttgaaaatccgattaaaagtgtagaacttttagaaaagacaaatatacacacactattacatacatcataacactaagcgtgaggagtgggattcatgttatgaatacatagcatttgttctgggaatagcaaaaggttgatactcaatacatacttatccaatgaataaatgagtgaataaaatttcaggatggatttggatggctttgcaagtgagtgtcaataaaccctgggttcagagcctccattatgaacgaaataattatgaaattgaattctcctgatttcttttggccttaaagactttctttcctttactgtgttaagggttgaccatctccttcctttccaaacaattaaaatgtatggagggcatatatgtttgattaggttttcatgtagagaattacagttacttccagcctgtctcatgatttccttgatgggatatttggttgttcctaaactcctctgtagtgcatttaattactatctcatagttttcctaccacatgtctaatgtaatgcattttattcttacagcttcattctcaaaagacatcatttatccctttatttccaagttcctagggcattttagtacatgtcttgacaaaggacatatcccttctctgctgctggaatgggctgccgcctctgagctgcttcaggcacgcattctgaaaagacgttcacacagggaaaaattccgttcaccttccttctcattcaaccgtcctgattttgtctgtgccattttaaaagacttgtgtgcctactttctttgtcagctacatctgccataacaaaataccaaagactgggtggcttaaacaacaggtatttctcacagttctggagattggcaagtccacaatgaagatgatggccagtttagtccctggtgagggccccactctcatgacctaacccaaccctaattacttcccaaaggactcttcttcaaataccctcatactcgaggttaggacttcaacagtaggtcacacacttactgctaattaaggatgtctctgaaagctgtagggggtcacagatgtcactaacaccaaacaatgaaaaagcacaaggcgtcttctttgattcgttgttataggaacatgtccacacttccctccctccccttcgccagtcactgaaagaatacaggatgtgactataaagtgatgtctccaatttttaacatttaaaatagaaaagaaattgtacatttaaagaaaatatggtgccttttcaagaagtcccttggggaaccacactcttagtctaatgacgcttctgaatggcagagcacctttttttaattccccaaagaaaatgcctgcagactttgtggcgtgttctttcgaacgtccgctgccaggaaaatccctgacctttatgcgatgaatttgattttgggaaatagcaaaattgcctttggagacaagttttgcaatcaagttaagtgatcacaccagagaattctgcttcaggaacaaaactgggacagataatagactaataagatgccttcaccaccaggcttgtaaaacttgtcttgagaccaattacaatatagaccttttcaaacttatttttagcaataagagcatagtatggttagtgtgtaaattaaggtaaaaatattgaaacacaagatatatttgaaagcctaagtaatcctattttttagtttaacctttccaagactgtctttgcacacttggatttttatttgaaaataacaccaatttgaaattcatactaattgatgctaccacttcaagagttcatgaaaccaagcagtttcaagtgaatttgcgttggatcaccctgtcctgagagttaccttttggaaaacataacctgcacatatgtctcatttattctactcaatgcctcccgatgaaatcagtagcaacaatatatgcatagtagcgaaataattgggcaaaagatgaatcataattttgattgtaattgggggcagtgagagaggaggaggaaaatacagtcattaaaaacatatataagtaattggcttctttgctttcttgtgaaatatgctagccccacaacatgattcttactcattaactttagaagtgctgtttctaccgtattcacttcctagtggcattgcaggagatccgtttgcaatttgtgtgactgactcaagatttcatacaactcttgtttctgaaatgtcttctgatcactgagtcataagagtaacacttctcaagttgttattgttctgaaagtctttgaagggtctgggatacttggacaatattatttccatcggtacttttccatcctcctgtgtatggtattatttccagccaactttggaaaaatagcatttcaacagctttgcatatccacattgcacctgcttctggactataaatgattacgtataatttaaatttatagaaaatgttcacaggaaccagatcacagggcacatatgtgactactgattgcttctatttcttattttccaagtataaaaacatatttataatgaaaagcttatacttgctttatctccaaatcaacaaaaattaaacctctttgatattagccagatagactactctttcaactttgaccttaaaggacaataatgaatctcattaaaatcatatttccaaagtggctttcagaaagtctcctactcttacactatccccaggttcaacaagtttatttttggatgcacttaatgctttcgtttcttcttttcagattctgatttaatcacttagcttctgtggcataatcaagacaagttggatgaattgtctcctaactggattataatgaaagaagctctaactggtcttaacgtagtttcgatgtttggagtctttcacaaagagaaacaaaagcatgataagaatgtgctaagctaattcgaaagggaagcaagggtgtcacaattaaacaagggtgtccaattatattgttcccatacatcattccaccactccaataggacatgggcttatagagaacagagtcaagccttgtggttcctgttgtgcccagcacacacagcattgtgcttggtatatagtaggtgctcaataaacatttgaatataatttaatctaggctctcccagggagaaaatatagtttagggttcaaggtaaagaatctcaacatggccagcacagtggcttatgcctgtaatcccagcgctttaggaggccaaagcaagaggatcgcttgagtccaggagttcaagaccagcctgggcagcataatgagtccacatcttcacaaaaataaaaataaaaaaataaactggatgtggtggcgtgcatctgtagtcccaattaatcagattgcttgagcctaggaggtcaaagtttcagtaagcagtgatcatgccactgcactccagcctgggtgacagagtaagaccttggctcgaatcaaagcaaaacaaaacaaaacaaaaacctccaaaacatttaaacattagattctccagatatatgtatgttttgtatatcgatcattctatgccacaggaaatgttcaaccaggatctgggtaaccagattagtgtcacaaagaaggagtttgtagatcacctaggaagtagaactaagttatatctaagcaaccttacaaattgaaaatctatcagtctttgaaaacatatctgttctatgtttctcacagtcttattggtgatgggataatgaccagttggccatgatcttaacaggaaacgacaatgtaatatgctagcccttctaggtaacatatttaccctggcacagaatgccttaattccaaggtgtgactcactgtaatcctgagaattacagtaatttgggggtggaatattatggccaaaggcaatgagcacagaggaaacttctcactgcgaagctgagaatgaactgaaatgatcaaaaattgaatgcttgaagtcttttaataaattataggtagaaggtaaactcagctatttctggacagcaggaaagggtctaaacagaggaggtagcacagacgcagcaatggaatgtgaatgagtcatatttccacatcagtagggctatgaggagaccactctgagatgatatgacagatagtggctgcattcttcagccctaggaaaaatgaagattgcaggaattaggttaggaggtgaagactttcagggaggtagagtgggaaccagaggccagggagagtgttgtcaagtatgctgaccacacagtgaacacagaggatacagcttgatgctcctgaagtcattacaggcagggttaaattcccctcagtgacccactgacccccagacaccaggcatggggtcgaccagctctctccagttcttctccaccactacataagagaagaagccttgaaaatgccaccaagcttttgggctcagaatgaatcatgatggaagctactgcagccttgacactggaaggcatttcagttctgtcaactcttgcctcaaaggaatgttcatttccttttacacaagataaagcttctttgaggaggatttgtgtcaggtaaagaggaacactgaataaactgttgtggtggatgtcagtgtctattctgtgcctgaaattggaatttgggcttagaacttaaatacaggatgtgactcaatgaacagagaccagagttccagtacaagatataaagagactttgttttgaatcagttctagtatttctagaaattcttgttatatttgatggagtgaaatcggtaattctttgaaactctttaccttgtcagcttccatagtactctgctgtcctcattatccctttacttctctgagccttcacagaatccttcttatcttcccaacttacataaatgttgatgttccccaggaatccattctcagacctcactttctctatatgagctcatccatgctgcttcctccaatcatcaaccatattctgatgacatctacatctttacctccagttcagactttggatctttaaaatcatataattgcttctaccttctaggtctgactatctcacagataagcaaatgcaacatgatcaggatttatcttcacatccaagaggtccttctactacaagaccaccacatgccccatgaaagtcatactaaaaacttaggaggtgtcttgaattctcctttcccctcaaagcccatcatatctactctgtcaagtccttttcacattcccccaacactattcatggatgagtctcatcttctccatctctggaatcacctcgccttaaaggaaacatccaaatttatttttaaaatggaaatgtacccctatgcctgaatcacaggaaagcaataataataactgattaatatttctgcatcacttaaagaataacattcaaaatcacatgtcttttattatggaaatgcaaatcaaatcacattgagatattatgcaatacctcttaggaaagctgatatcaaaaattggaaagcatgaagtgttggcaaggatgcgtggatatgggaacatgagtgcatggctggttgaaatgtaaagtggtgcaactgctgaggaaaatggtatggtagggcctcaaacagttaaacgtagcattaccattgactcagcaattctacctttacgtgtgtgcccaaagaattaaaagcaaggattcagatatttgcacagcattgttcatagtagcattattcacaatagcccaaacgtggaaacaacgccaatgtccattgatggatgaagggataaacaaaatatggcataatatacatacaatggaatattatttagccttaaaaaggaatgaaattctgacatatgctatggcattgatgaaccttgaaaacattatgctaagtgaaataagccagacacaaaaggacgaatgttgttattagtttttctcagattacacatatttgaaatatcttagaagaagcaaattcatagaaatagaaggtaggatagtggtgataaggaactctgcggagagaagaatagagaatcagtgtttaatgggtagagcttcagtttgagatgataaaaatattctggggatggatagaagtgactgttgcacaacactgtgaatgtaattaatgccactgaactgaacacttaaaatggacaaaatgctagaaatatatatattatatatattataaaaatggagagacagagagagaggtagagagagcagatgagaaacaatgatactctatttttttcttctcacaattccttataactaatattggttatatatataaccactattctatatatcatggttatatataatatatatattatatcatataatatataaccatataatatatattatatataacacattatagatagcacagatgcagctatatataatatataatatattatattattataattaatataatatagtatattgtattaatataatataatatagtatattgtattaatataatataatatagtatattgtattaatataatataatatagtatattgtattaatataatataatatagtatattgcattaatataatataatatattaattatatatatttttatttctagatatatattatataatatgatatataaatatatacaatatacatttataaatatataaatatatataaatatatactatatataccatatataaaatatatacaatatatacaatatataaaatatatacaatatataaaaatatataaatatatacaatatatacaatataatatgtttaatatataaatatatataaatttttttttatatattaaaaaagagagaaagcttacggcatgtcaggtactatgcttaaaaaataaaagagtatataaatatatatatttatatatatctagaaagaaaaaaaacaaattgaaattacatgccatctcctacttcacacctcgggctccagcagctctatcgtcacctatgtaatcttcatttgcacgatacaccctgtccatatgaattgacagctgactgccactctaggacccttttctgcctccttacaaactggatgagggcttaggtcgctgacaatattccaaatatacccttttattttttaagcatggtacctggcatgctgtaagctttatttcttttctttttttcttttttcttttttttttttgagacggagtctagctctgtggcctatgctggaatgcagtggcccaatctcagcacactgcaagctctgcctcccgggttcacgccattctcctgcctcatcctgagtagctgggactacaggtgcccgccaccacgccctgctaattttttgtatttttagtagagatagggtttcaccgtgttagcctggatggtctcgatctcctgacctcgtgatctgcccgcctcggcctcccaaagtgctgggattacaggcgtgagacacctcacccagccaagctttcttttatttttatttttatttttttcggatggagtctcactcacacggttgcctaggctggagtgcagtggttcaatctcagctcactgcaacctccgccttctgggttcaagcaattctcctgcctcagcctccagtagctgggattaaaggtgtgagctaccatacccggttaacatgcagtaggctttcagcaaacactgagggaataagctcatgagaagcagctatttttacaaatgtaaaatattaaaattggaaggaatcttaaagtttagtctaaattcttaagaaaagtgctattttgacatggtagacaaaatggtgccttccagaggcctaatttccattttaaattaaatagcagcccccttttttcttttccttttgccaattgattctaccattttatgaactcatagaagggttagatctgaatcacacaattcattatgtcaagtgttttccaaacttcaagaaatcttatcacatcttcatagtgcttgctctacccatggactagctgttcaaatgttcaaataagttcatcttcatccaaagcaatactgtcaataaaatataaattattttatcttattttaagttccaggatacatgtgcaggatatgcaggtttgttacataggtaaatgtgtgccttagtggcttgctgcacctatcaacccatcacctgggtattaagtcccacatgcattagctatttatcctgatgctctcccttctcccaaccccctgacaggctctagtgtgtgttgttctcctcaatgtgtccatgtgttctcatcaatcagctctcacttataagtgagaacatgcagtgtttggttttctgttcctctgttagtttgctgcggataatggcttccaattccatccatgtccctgcaaataacatgatctcattcctttttatggcagcatagtattccatggtgtgtctgtaccacattttctttatccagtctatcatcgatgggcatttggcttgattccatgtctttgctatcgtcaatagtgctgcaaggaacatatgtgtgcatgtatctttataatagaatgatttatattcctttgggtatatacccagtaataggattgctgggccaaatcgtatttccagttctaggtctttgaagaatggccacactgtcttctatgatggttgaactaatttatatgtccaccaacagtgtaaaagtgttcctgtttctccacagtctcatcaacatctgttgcttcttgactttttaataatcgccactctgactggcatgagatggtatctcattgtggttttgatttgcatttctccaatgatcagtgcaaatcacagttttgatgtggtgtttatatatttttagtacattaaaataaataattaactagtacaataaaaactcacggatgtaccacctaatgtcattttcttgtactacatggtatgtaaatcatgctttgaaaaatcaatttgaatgcatgattgactactttcttgaattatcctccagggtcctgcatagacaactctgattcctcaacaagctttcacactctctaaaagcaactctctaaactctctcttttctttgttgtcatcgttttatgtttcttagctccttgacgtttgtcaagctctcaccgtattcaacaagtatctgttgaatagatatacttgctgcttctgagatggtatatattatcttcccttataaagtgaaagctatttcataaggttataaaattggaaggtgagatgtccatgagattgcaccttgcaaacattcaagtacaaggaggcaattgaatctgggtcgtggctcctgtactcctgaatgtttgcactaaggccacacctcccacagactctttcaaccaatgactgaacctgtagaggatgcgatggaaggcttctctctaggcaacatggaactcctctcatagccaactttggtttcagaactccctgaaagattgctgaacctattgacactgcacggtggtctagatcacttccaccaacttcccttccccctctccttcacttagggtcagacttgcatcataatttgattgattgttctcccactctttctctcctcatttttttggagggattttttcttaataaagtccctgtatatatagcgctgacatgcttcttgggatacttggactaacatagaaagtattagtgagaactacataaatgttagagatatttcaagctgaatttgtctatgagagtttggatagggttaattctgaattcagacagtgttgagttaaatttctgaattacttagttgtattagtttactagggttgccataacaaaataccacacatcgggtggcttaaaccacagaagtgtattttctcactcttctagcagctaaaaatctgagtttaataagtgtccccagggttgatttattctgagggcttcctccttggcttacagattatgatcttcaccctgtgtctacacattgtcttccctctgtgtgtatctctgtccatattttctattcttttttgttgttgttgttgttgagacggagtcttgctctgttgcccatgctggagtgcagtggcgtgatcttggctcaatgcaacctccacctccctggttcaagcaattcccctgtctcaacttcctgagtagctgggattacaggcgcatgccaccacgtccggctaatttttttgtatttttagtaaagacggggtttcaccacgttggctagactagtcttgaactcctaacctcaggtaatctgcctgactctgcctcgcaaagtgctgggattacaggcgtgagccaccgcgcccagccaataacctcatattaacggaactacctctttaaagaccccatcttcaaatacagacacattctgagttactgggagtgaggacttcaacatttgacttttagaggaacacaatttagcccatagcaccacctgaataactttgagccagtcacttgactttacagagccttagtctgtaaaataggggacaatatctaccatattattttgttcaaatcaaatacagtgacatatataatgccactggaacatataaggcaatcgtcattaaaaaaaatcctcccaatttactaaaatcattgccattactttattagaattaatttatataggggttctattattcgcagtatgtctcacagctatataaagtagcattatatgataaggttgaaaaggaagaggaaagaagtatacagtgtctgattgcatagcttcatgtttatgatatgacagttctatgattctgagcctggcatatttatttaagctatacaccagagttcagaaattgatagttaagaggcacatttggcctgaaaatgtctgtgattttccagagagtattttaaaaatcagaatagaaatgcctttaaataaagcatgcttctgctgttttccacagtttttcatatccctaacacatggtcacattatacaggtataatacttatctagcccttaaaagcttttaaatggacaatctttgaagcacagaccacaggttcagaatgtactgcttctatgtccttgactattctcaaaagaacatattttctaccatattatctaaattatctgagaaagacacaggtgctgctacattgttatcctctagggatgctcacgtttcttcaatatccacaaattcctcctacaatcatctaaggctgctccccattccaccagtaaatattaatcaacaaagtaacaaatagtgcgatgtgccaagcatctttagcgatatgcaccctcaacttcaaacagaaactatttgggatgatactccctcttctgcctgtagataggtaaacaccctctgcaccctagatttaccaaacttcatgacgtacccaccctaaaaggacacgatcttcagggtacacagagtttttctctagatgcttgacgatatcgccattcttcggctatatgagcttgctttttaaaaacaattacttcaggaatctggtatccagaagaaaatagggtagttttcaaactttcattgcattatttttcatgatcaagattataaggtaaattggaactattatcatgattcactcttccagatggttatgcaaagattgagtgaatgaatagagacaattttaaagaaatgaataaaataacttgtatggttaagtagcaaagccaaggagaagttgggaggaagagttcccaaattgccttcctgagactagacaatttgagtaggtcaagaatgagaatctctacagaaacttgctaagacttttaaatgcagtcatgctttgcttaaggatgaggatgcattctgagaaatgtgtccttaggggattctgttgttgtgtgaagatcacggagtgtacttccgcaaacctagaaggcataaccgactacacacctacacgatgtgatatggcttattgctcctaggctgcaaacctgtacagcatgttactgtattgaatactataggcaactgtgacacaattttaagtatttgtgtattttaacatacctgaacatagaagaagtacagtacaaatactatctaaaagtccaaaaataatacacctgtatagcacatttactgtgaatggagcttgtaggactggaagttgctttgagtgagtcattaagtgagtggtcagtgaatattactttataaacattgaagactttataataaacattgtacacagaggttaccctaaatttaacttaaaatttctttgttcaataataaattagcttacttgcaactttgttactttttaattttttaaaagcattttgactcttgtaataacacttagcttaaaacataaacacattgtatagttgtacaaaaatgttttctttctttatattcttattctataaaattttttctattaattattttactttaaaaagaaatttttgttaaaggctaagacacaaacacaacattagcctagacctatacatggccaggatcatcaatatcactgtcttccacctccacatcttgtcctgctggaaggtctttaggggcaataacacctgtggagctgtcgtattctatgatgacaatgccttcttctggaagacctcctgaagggcctccctgaggctattttacagttacctcccttttgaaaaaataagtagaaggtgtatgctctaaaataataatgaaaagtatagtatcgtatagtatagtatagtatagtatagtatagtatagtatagtatagtatagtacataaaccagtaataaagtcatgtattatcattagcaaatattatgtattgtgcataatggtgtgtgctatgctttgatcagactggcagcacagtaggtttttttacaccaacatcaccaaaaacactgagttatgatgttatggcggctacaatttcatatgtgatagtaatatttcagctccattaaaaccttgagaccaccattgtattttcagttcattgttgacccaagcattgttatgcagcaagtaagtgtgtatttaagctgcttaaattaatttcaattgctgttccaattttcttagtcattccacattttgttatgacactcctgaccatagaagaatgcagcaaaacctcacaattcataaaatcacatcagctgtgcacacagatgatgtacatttattctgtgtaagcatcttaaaaacaaactcaaacccattcttttttccattgcataacctttaagcacaatccaaacatttcatttgatgctattaaaaagatctgccgatgcaaaaccatattatagccaggggtggcgggttaatacttcaagtattttcaagataacttttactgttttggctatatacaaggtggtgcctttgcactgattttgtcaccccttagcatgagatgaaaatccacaggaatttaaatctagaattagaacatatgagcaagaaaatttgatttctttctgatgcatgccagaaatagtatattaacaataatacaataaaggaaattcaaaaagtattcatctaatccttactaaagttattatcaatgagttctaaactttattttgtcctttaagaatcacaaattatttgtttcaaatgatcctaatcatcatctaatgtgtcttatactgctatcctataagtttttttgtttttgtatttgtttttgttctttggagatggagtcttgctttttcgcccagtctggagtgcagtggtgtgatctcggctcactgcaacctccacctcccagattcaagcaattccgcctcagcctcctgagtacctgggattacaggcacacaccaccatgcctggctaatttttgtatttttagtagagacagggtttcaccatgttggtcaggctggtctcgaagtcttgactttaggtgatccaccctccttggcctcccaaagtgctgggataagtttttatcccataattaccccataaaatttgaataagaaaatgaatgcctcaggaaaggcaatataaaacaatgaagacattaactagtagtcattataaatatagttaaagacctaaatgaaatcatgcttatagaaatagagaaagccatgacaacaacgtttcagcaaagagagaatatcaataaagatatagacattattttaaaaagaaccatctggaaatgcttgaattgaaaaatataataaccaaaataaaaaattcactagcagaaagtgaaaagacaacccacaaaatggggaaaaatttttgtaaatcatttatctgacataggacttttatccaaaatatataaagaatttctacagcttaataatcaaaagaaagatcactcaattgaaaaattaagaaaggatctgaatataaatttcttccaaaagtatgcaaatgaccaatatgcacctaaaaagatgctcaacatatttaaaccattaggaaaatgaaaatcaaactcacaatgagggccaagcacagtggctcatacctgtgatcctagtgctttgggaggcccaggcaggaggattacttgaggccaggaatttgagaccctatctctacaaaaaaattaaaaagttaaccaggcatggtggtgcacgcctgtaggtctagctactcaggaggttaaggtaggaggatcacttgaacccaggagtttgaggttgcagtgagttatgatcctgccactgcactccagcctgggcaaccgagtgagactctgtctgaaaaaaaacgaaaaaagaaaaatcacaatgagttagcacttcacactcagtaggatgaccataatgagaagcacagaagaacaagtactgggaagcatgcaaagaaattggaaccctcatacactgtgggtgagaagggaaacggctttggaaaaccttctggtaattcccagttaaacaaagagttacccattatctagaaagtaagtgattttatatcatagtttctgctgcacaattttaattcatttattttactgacaaaatttaacaaatttattttagtgataaaattagacaacttaaaataatttgaaaccaagtaaagtaatgctttttcccttgcgacgtcattagctagtacaatgaatttttgagtatcaatcagtagtagccaccactcttgtcaaccagagtcctctctttagccaattctctagttcaaggcaattaatgtttttgaggttgacatgggagtcaggcatgactctgtggttccttccaaaccatcagtgaaatgtttaattatatttagtaccatgttttatgaagtcattttattcttggaattttggcaaaccttgaatcgtacttatagtcattccccaacaactaaaatatctgatttagtcttccagatattagagtttacataaatatttttaaagcttacattttcatatgtatatatttccaatgaaacccctatatgtttgaaccgtttctaaaattgtcattaaacacccagcaataagtctattattctctgtactaatttgctatacttaggctgtgtagaaagttttctttaatggtctcttcaaaatttcaactccgcccgctgacatttagtgaatgtcaagatgcttaatacagggctgtgctttctgcttttttcaatagatcctattgttattgacttatcctgatgagaaaataattctatctcaaatcttagaaaatgtatctttggatcaagtaagtatgttagtttcttaaagtgtccaacccttcatcaaatttttttcattgattaattttacaaattttaagaggaaagggagaagtgatcatcttattttatgtaatatgtttatttgtttaaatatgtagagcttattgaactacattaaaatagaatgaggctgtgagaccacatagaacctgagaggagatttaccagtaggtcaaagaagcttttactttaagaatatcaataatttcccaaggcaagaaaaatgtaagattttacatgctaaagtcatatagtcagcatcatttaaactgccaactgtcacaatttatgatttgtcatttagggtttgtctgacccccatacaggtgaggtaggggaggaagaagagagaaggtaggtccagctcagatgcctgctcaggtggtcagaactcaggagatgaaccatactgagtagctggaagagttaagaaacctgtgtaaggatgggccaattgtcaaagcagttggagccaaattctattcttagtccaagtgtttagcaagtgacttagagagacaaaactgctgccagaagtcaagtgaacaccattatggtgcatgtagtgaaaacaactgagagagagagagagagagagagagagagagagagagagagaactgcaaaaaggtcactcattgatactgttttttttttttttttttttttttttttgagacggagtctcactctgttgcccaggctagagtgcagtggtgcgatttcgcctcactgccagctctgcctcccgggttcacgccattctcctgcctcagcctcctgagtagctgggactacaggcacccaccaccacgcccggctaatttttttgtatttttagaagagatggggtttcaccgtgttagccaggatggtctcgatctcctgaccaggctatctgcctgccttggcctccctaaagtgctgggattacaggcgtgagccactgcacccggcctgatactggtttttaaaatttattttaatgatttaataactatttactgaattctttcagtatgccaggcctagattaggcttcagtgatataaacgtaaacaaaactggcacagtctttgacatcatggaacaccgattctaagagaaagagagaaatattagtctaatggccctgaaaataaaaacaagttacaatcatgaagagtgtaataaaggacaaagttgctgtgataacccataatgaggcaacttgacttctcagggtcccttgccttctggtttctggtcagatttgaccaatgggaggtaccagtaccagaggagacagcagagactgagatctagatattgtttcctctgcctcatgccaattatggctttctagttctcagagaagcctgtacatctccagcagctctggccatattctctttatggttccagctctcgttattatagctcttgttattgttagtatctggatggcttgagattaaagggtccatgggatgtcctgctgctggcagtggctcacacctgtaatcccagcactttgggaggccaagttagtttgctcggttgaacccaggagtttgagaccagctggggcaacaaggtgaaaccccttctcaacaaaaaatataaaaattagccaggtgtggtggcatgtgcctgtgatcccaactactcaggaggctgaggtgggaggattgtttgagcccaggaggcagaggttgcaatgagctgagatcgtgccactgcactccagcctggggggacagagcaagatactgtctcaaaaaataaaaataaataaaaataaaataaaaaaggatccatggtaacatcttcattaatttctttttagaatctgattgggatatagccttctttttcctgcaaggacaatggctgagagtcagttaggtgaaaactgggtaaaggcagactaagaatatgaaacagcatctgaggtggaggtgacaatggccagtcatagtcacgtgagtgtgtctggaacatggaacacaaccagtcttgcatgaggcaggagacctaggcaagagttggatgatgcaaacctatgggtcatttgggggttttgtctctattataaaagcatttctgaaggttttcagtcagacgagaactttatcaggtttcaattttcaaaagattattctgactgtgttgagaaaaacatattggggaatatcaacagtgggtgtggatagatcagtttcttaagagctttttgaacagtttgacatagagctgatgattaattagactaagatgtcggtaatggaggtagactaaaagaaattgaaaggtttaatcggggtcaacaaagtatggcctgtgggttggctgtcattgtaaataaagttttattggcacatggccacacgtatttattatggattgtctatggctacaacagcagagtagagtggttggaacagaagctgtgcggcccgtgaagtcttaaatacttactctcttgggctttaagaaaaacttcgtcacccctgggttaaatcaagagcatttggcattagattagatacggggctgagggaaaaaaagggaggcaggagagtcagggacgaaggagacgaggccacagaagctcttctttgacagtgataatcttattttaggtgcataattttgggatttataatatacagatatataatgtatgttatatatattataaatatatatattatagatacaaaatatgaaaagatatgtaatcttcttgtctttgtcaccaaatcatcccattgctgaataagacttcttctattgttcttttgttttaattgcaaaagtctagttttccctttgaagaaaagaagtagagaaaacattaattcacaagggaaaggaccgtttgtctaattttgttagaaggtctcagggctcagttctcttctcttatttatgtatattcactcttctttgttttttaaaaaaatcttatctaacctcatggctctaaataatttaacatgatgacaattcacagtttatatttctagtctgaacctctaaaattccagacaaataattaattaccttttcaacatcgccacttcgatttctaatagacatctcacaatcactgtgtccttaactgaattcttgacttccccttaagcagatctactcacagttttcccatttcagttgatgaaagtgccatcctttcagtcattcaggccaataccactgggaccctccattaggaactatgttgcctctaccttcagaacatatccagaacctcaccatctctcccctcccccccaattgtcactgtcctgatcagagatgtcatctttcctaggctgaatttctgtaatagcttcctagcacgtctacttgcttctatccttggcctacccactgtagtctattttcaaagaagtagagtgaaccttttaaaatagaagtcagatcttgtcacctctctactcaaaactctccaacagcctctgatttttacttgctcagacaaagtacttaaaactgcacacatgacctcacataatctggcttccatattcctctggcttccaatatgttttattcactcctctaaatcatagagtctccttgaattaacatgttcctgatccaatgtactgtagtaaaggagtgaaaagtaaacatgattcccagaggcagttagtgagatggttgcaggtaaccattgcctcccacactctcttccttccttccatcctggcataggttatttagcaaaatacttagtaccttctaatatgtgttacatgactgctagatgccagtgataggaaaatccatacaacataggaacacacaatctggtggggaaagatgatatggaaaccaaccaatgcaagacaatgcaaaaagtgcaggcatagaatgatgggctgtaatttttaaaaactcaccatgtctaagttgggaaggatagagattctatatgatggatgcaagatcattccaaccaatgtagtttggaagaaacccaaagcattctaaattatctagtgaacttcatgttgctctacctaaagtatttccatagtaaccaggcctgtgctcttgtgtggagcatgagtggctaaccactgaattatattccttttgtcacagtctaagagcaatataaattcctctttttttcaaaatgcttcccaacttgagacacaaacattctaccaagaatagatttgacttaattatctatacgtttaaaatgtaaatgcagcctttctaagagaagcctacatttgttaaatcaatctatgagatcaccttctttctaagatgagggtaacttcaatattgaagtgaagacagtatagagacactaagaaatctacccaaggacacacagctgatcaggggctctgacttaatttttttcccaaacattaggtttcctgagtgcaaagttgttatattcgttcctacctcataagattgctctgagcagtagaagtgataatatctgaaacatgtaggacactttctatgatgtactaacagtgcagtaattgttagtttctccaatgtcccacagccaacctatgctactggctgcaaattctaagttatggactattaaatgatctggtcaaaactggatatggataaaaatgcactttagaattacttttgggaagtagaggttgccaattaggtgggtggaaatgctttctgtcctgtaaagtccaagagttgtctatcaccaacgacaccattggagggaagctgttgagtgcactacctgccatctgggcctctgttgttggacactacttgactctttaaaagaggttgctgtcagcatcatgtctatttgcactggttgttgagcatcattatggaaggtgagtggcccatgttgacctttatgctcctacaccaacttgagagcctttaactgcatagaggcctttgacttaatgtaataaaataatgactctttccatttcaatgtttccattggtgttttacttgaatccctactatacaaaaaaccttagtctcaatagtttgaacagtttcttctatgtccaaaacactcaatattgagttctcttgataaaaacaaaacttggagttatttaaaaaaatagttcagttggagactccctttgctatctaaggcaggggtccccaacccttcggtcatggactggaacctgtcagtggcctgttacaaactgggctacacagtaagaggtgagtagcaggcgagcaagcaaagtttcttctgtatttacagcagctccccatggcttgcattactgcctgagctctgcctcctgtcagataagcagcaccattagattctcttaggagcgtgaaccctattgtgaactgtgcatgcaagggatctcggttgtgtgctccttatgagaatctaatgcctgatgatctgtcaccatctcccattaccctcagatgggactatctagtggcaagaaaacaagctcatggctcctactcattctatattatgtgagttgtataattatttcattatatattactatgtaataatagcagaaataaagtgcacaataaatgtaatgtgcttgaatcatcccaaaaccatccgctgctccccacgtccatggaaaaagtgccttcatgaaattggtctctggtgccaaaaaatgttggggaccactgatctaaggtgtttaacaaactgtttcttacttttaatcaaaccataccacactgattgacttcagaaatgctttgtttaactagaagtgttcaggacttacgcatgttgcttttatcatcatcatcattataacttataacactaataataacaataaattaccagactttgagaaaaatctcagaagctcaatgaagtgtatagttcataatcagtactaaattgataggcttgtggtttagaatttgtgtagcggaacgaggataaatcagacttcagtatgatttgtgtatttgtttactgtagcagaaatatgatgtcctgaccatgtccccttgacccactctggaagccatgaaagatagtctcattcagagctacagctgtccatggctctgcttgagggtgttccccaggcccagagaaacaccttcaaaggagagagcatggcatagaagcaaccctcatccaacaaaagataggaattgtccatttcagggtcaggttccatcttccatctggtctccaagagggtcctcaaaagactacgcctcccatgactatacaaccttccttagctttcctctcttccttgttccccattcccacttcttcacatggctttctggaattacttcccaagttccttgcacctacgtgcttgtcatagagtctggcatgccttaatgaaacactcgttaattttttatttgagatccattgaatcctcactctgtgccagacatctttcatttatgaaatagtagcttctatttttgtacccatttttgtgataaattaatgtttagagagatgttaaataatttacaaatcacagtgagtggcaaaacctagtcaatttccattcttcagttgcttctattgtttgattgctatcttttacctttactccatgaattcagattggtaaaacaaacaagagactaaatgctgttatactgtgacattctgtaaaattcaaatctctgggtgaattttgatctaagggatatagaggtgtgtcttttttgttgttacacatgcaaagaaggcttctctccactgtacaatatccccttggcttggctgtgagctcatctgctctcatttttgacttcagtttcctcaaatggaaaatgaaatgccttgggctaaatgaattttaggatccattgaaaagctaacttcatacaaattcgagttatgtagtctggtccctccggccaactctacatcgctagctttttgttttatgctgaattctcttgataacaacttctaaagcaaagcttttctataaaatgccagatagaaaatattttaggaattttgagctgtaaggtatctgttgtaatttctcaattctgcaatgtaacacaaaagacaatatgtaaatgaatgagtgtggctgtgtcccaatgaaattatttatgtcaacaagcagcaaagccactagacgtgctcaatgttgcacacagagaacagcctcgaagggcctcacaccaagacatggcagatgaggaatgacaggaaaatttcaaacattgcttgtatcctctgtgtaactgtcctcctggaaactttaaagatatcgctcactcacatagcttctcaaagaaacaaaggataaagaaagcttttctatttctttcttacatgagcccggatggcttctacttgacatggactgttttgtgttgtgtttgcgctgggcttagaggctgagaagagtcaatacccaatgggggtgttgtctggagagctggggaatatataaatattgcatttggaatgtactttcctcttgaacaatcaacctttctgcacaagtttgcttgctaagggtctgttattggcatttttcttataacccctctaataccaagccttttcaaagaacatatgactcagagcaaacattcttttgaggttgaatctggcattcttgatgttattcaaggaatatatttctttgtataaacttttcatagaaaacttcctgaacctgttttagagagcccagaaagtcctagaaaaaaaattgctgcctcatgcttaagcttctagtgggttttgtgaactgagaatgcgtaaacatggtcaaacattatttctgatcccgtttgtactgaaaatctctcctgggctggtgatttgtaattaatgatagttcaggaaaccttgacaactatcttagagttggggaaaagtgatacaggctaagcaacgagctcgttgtcattacatgtaatcaagcagaaattgaacagccattcaccaatgatgctgttcagagatttcacatcaggtgagactttaagaaaatagactctgcagagactcacctccctacctgtgagggagaagcaagggaaggagtggaacaaggtctaaggcagattctatactctcccttttctcctctctcctctttgaactggaaaaactcaggtttacttttttagatattagacagttaggaggctttcttaggaagaaagtgttctactactactaataacaaaatgaatgaatgaataaataaataaataaaatttaaaccactggacaactgagatcttgaattatgttaatcttaagattttaaattttctacaagtaggctttgacccattccacataagaactcatccctgtctatcttcctcttagtatctctctgatctccacaaaacaagtatgaactctttttatcctagatacatttaacagctacatttgatagaagagtagaaaattcttcataggttttccatttacaaggaatagccatcaggtttagaattttgaccatcattaataagtaaactcttcaaaagtcaagcagggctatgttttttgagaactcagccctttagggataaaaggaaacctttagtaaatatccatcggtctattgcatcttggccctaggggcatgcatactcttcgtgttatgtcctcacataacttttatagctgattctcttaaagaaggatagagtcagaggagacagtgaaaaccatgaaagtatgaacatggaattcagaaaaggtgacaatattagtatcaaacatatgtcaggtatggtaggtacctgataaaaatttactgaatgaatgattgaggccatgattatagacactctctatataaagtcttctataaaaagaagaattttgaagcaactatcatttaatttaaatattgggccaatatgtattttaatggtaatgttggaaaactatttccagcaacaaactttatagtaataagcaagcattctgcttatatgaaaatcacaaacagtggaagatattgacttgtacttattgtgcaggttctgaagaaaaccgcatatggtctctctggcaaaagctaatgaatttatgttaaaaatatttttctgcgtgtattgcaagtgttatatacacataattacatgataaatataattctatttgattttccaagtaattaatattttaaatatttgcaaaaagggctatagcacacacaaaaaagagagagacattgaaaaatctgttttaagtataaaacctaagcagttggcagaggagaaaagaaagaaattttttacatctcattattaggattcagtgcacacttatagaagagttccttccccctaaaccctagaattctagcagagaacagagccaaagtgaattatatataaccctgaagcttcatcaagagaatcattggtatttgtttacagatcagtattgaaaacaaatcagcctggagggtttagctgtatggaaggatgtagtttgcttcttaaataacccaagctgtgttgaaaatgttctttctggcctccttatgttctttctgttttgtttctcctttcaaatgcagagtgaatatgattggaatggtctttagcttcagccaagatctctaatgccctatgactggggcacccttgtcttttcccctggtcttccttagcatggtagcctgtgatacttcccaaagttgagttctgggtgactggggacagcctgagaaatgatggtcgaatgatggttgaagtgatggtttctgtcagtcaccaatgaaggggcccattaattttcaaggcttagtgtgagttccatctgttatcctaattgtttgtggagattacatgccagggaaaagagttactgaattaattaaaagtaaatgtcgcttcctaaaactcagcccggtaaacacagcttggggaaatatttccttttgcttgaatgacagctcttggagttaggtaacgtggtgctttcagacatggtttacacctgcagaaacgtacattgctggacagctgtcctgccccctagggtatggatcactgacagttctttcttactgtcaattttgcagagcccagaggcagatgcctacgtgacagcactttaccatccagcatgattgataagacaacccaataaggatccaaagcaatttccttctcttatccttgcctctcaactacatttgcttttaatggacatgagtccaggctggcagttgtggaaagattctgggatgcaatgttttgggggagagcaccaagcttcatttctgatctaaattgctagttggttcttattttaatcttaaatacactgaagaacagttgcctttgatgattttgtcagaactgctagtttctaacgcatctttggcattgcctgcaatttccaaggctaattttaatatatatgaaaaatattttaggattagaatgtgacatcctactaatcattcaaatgaaaaagtagagtggttgaagtcaccattgttctctgtagcaacaataacaagcaattgttatctttactagctttgtcctaccactcctgtgtggctctgagatttacagcaatctacaaatacataacaatcttcgtttcacaagttatggctcatgtttcatattcctttgggcctagcaaattttcattgctggtgaggtctagccattggacaaccaaaaattatgccatttttgaccttgagtcttcattaactaggagacaagtatatatgacatagtggagactgtttaggaaaagaaaggaaaggaaattcatatttattgaggctttataatgtacgattgtagtgggtactgttggtgctctgctcatattccctgagattcctgtttacattttctagtgccttttgctgccttgctaagctcttccttcatctaatggcctgcatctgtggctcagcttgggagcaaggatggcccttgcattgatggaacccctgtgtccaagaggcagagagtgggacgtgcttgagagtttacagcttcataatatcttctagccagattgattagttgagggaggaagacagcctagctctcttgccttaagtcacaacaaaatccagagcataattggcacaagacatttcctttctgcaggatcactctgagactgggactgtgcctgaaattatatccttgcttgacttttctccacactctgttactcctttctcctgggaacactttctcaataaatcacttgctccataatctttgccacagagtctgtttggaacatacttatgctatgccttctacatatactgtattacatatgctatgcctttatgaatactgtatatttaatctgcacaaaaattctgctaggaaattcatgatcagagagatcaattaacctgtccaatatcatagaaggattaggtggacttgaactcaagtcttatcccttaatttattacattttatgctaagcacaggcaagggatatggaatacgtagatccaatttggggaataaaggcatttggagatagattgctcctgcaaactagacctgaataccaacttcttacacaaaagacatcatttgagaaggaaaagataagtgcaggtttattttgctgaaaatatatcaagcataaagagtactctattttggcactggaagcaaatgagtcttaaaaactgctatgtgattagctgggcatgggggtgtgtgcctgtagtcccagctacttgggaggctgaggcagtacaattgcttgaattggggaggcggaggttgcagtgagccgagatggcaccactgcactccagcctggggacagagcgagactccgtctcaaaaaacaaacaaacaaacaaacctgctatatgtcttgtttcatgacggctttttaaaataaagaatactcatgcaatgcataatgatgctttggtcaacaacagaccacatgtatgatgatggtcccataagattataattaaactaaaaatttataccaccttagtgacattgtagacctttctgtgggacaaaatgtggaggtggaagatctgatgatcttggccctggggtaggccttggctaatgtgtgtgtttgtgtctttgttttaacaaaactctttaaaagtaaaaataaagaagtaaaatgaaaaaaaaatacaataagaatatgaagaaaggaaatatttttgtacagctgtacaatgtatgtgttttaagctaagtgtggttattatgaaagagtcaaaagtttaaacaataattgtttataaagtaaaacaattataattagctaacgttaatttattactgaagaaaaaatattcttataaatttaatgtcgccaaaatgtacagtgtgtataaagtctacaggagtttacagtaatgttctgggcctaaactttcactcaccactcccctggctcacccaaaacaacttccagtcctgcaagctccactcatagtaagtgccctgcataggtctaccatttcttatcttttataccacatttttactataccttttctctgtttagatacacaaatacttaccactgtgttacaattgcctgcgatactcatacaataggttgtctatttccagtatagcaatgggctatatcatatagcctaagtgtgtagtaggctacaccctctaggtttgtgtaagtatgctctatgatgttcacacaatgacgaaattatgtaatgatgcatttcttataacgtattctcattattaagtgagacataactgtacttgcgttggaagtggctagatccagtatcacacgcggtctttgctagaaacaaatgaatgtttgtaaacagtaaatcaatcaaatcatcctttgccattcacaaaggaagttaagaagcttggcagaaaaaggtctcgcaaaccctcaacttggatttttttttttacagcaaattagtttaaatcaatgacctcaaatgaagagaattattgtcagcatttagcttgatctttctcattaatgacttccactgtgtttctcccataattagttttataaactagcccaaaaaacaaacatacaaaatgctgggggtttttttttgtttgtttttgtttttgtttttcctttgagacggagtctcgctctgtcgcccaggctggagtgcagtggagcagctcactgcaacctctacctcccttgttcaagtgattctcctgcctcagcctcccgagtagctgggattacaggcatgtgccaccacgcccagctaacttttttatttttagtagagaagggttttcaccacgttggccagatggtctcgatctcctgaccttgtgatccacccgcctcagcctcctaaagtgctgggattacaggcgtgagccaccatgcccggccaaaaatgctttctgtaacttccacaatgaaatattattctcagattatcactaaatttaacccaaagattccattatctcttgctttttttattattattacctttggtgcttggggagttcagagatgccacagatgcaggacagtttatgactcatagcagaagcagtaccaacagtctcatgaggctgtgactggtagcctggcctccttctcccactttcctggagcatccaggtcatacacacagatacttcccagttcccctttggttgaaggagggcttcgaatcccttcactaacatccagcaacagcaatgtaggcaaacaaaagtcctaaggtctgagttctagcaagcatttggaggaatgacttacaaggaattaaagtctcagaaaataggataagttataaatattggctttccatatgtgcattcaactagcacacattaaattccaagtattttacaaatatctacgttatgaggaaagatattttaatccatttcatagaagtctgaggttgagagggattgttaatttgctcactccagtaagtgaaagagttgagattcccagctggaatctccaatctaaactcagtgttccagctccttcacagtgttctgttgggctcagaggtccacagtgaaaaaagcatcctgtgaaggctggcatccacatcattctcatgtttttgagagttcactgcaggcagttttgtcaacggcaccagattgagagtgaagctagaagaggcagacgtgggatagctatatccttggcaataagcatcaagaggctgggcgcggtggctcatgcctgtaatcccagcactttgggaggctgaggcaggtggattatctgaggtcaggagtttgagaccagtctggccaacatggtgaaaccctgtctctactaaaaatacaaaaaaattagctggacatggtggtgtgcacctgtaatcccagctactcaggaggctgaggcaggagaattgcttgaaccagggaacaagggaggtggaggttgtagtgagctgagatcatgccactgcactccagcctgggcgatggagcaagactccgtctcaaaaaagaaaaaaaaaaaaaaggaataagcatcaagagagagtagccagaaatatcaaaagccccagatagccttaatttaagggctctagagttctcctctgcaagaaacccttattctactttatagtactctatttattaaattcattcttatagggtgactaaaatgtgccagatccccaccctcaaagcacttaaaatctaatgagagagacaaacaaactggaaaatttccagttgttataactgttactaatgaaataaacagaatgtgacaatgcagagtgacattcaattgctcttacttgtttatgtaaccactttcactaacagaccatatgagctcctgggagtgatcttttgttttttattcttctttatatttctaatgtctagctaattttagatcctcaataaatgctcatttaattaattaatagatgagtgaacatataaagcagcctctcaatgatgtactctatattcatctgttctcatactgctataaagaactgcctgagactggataatttattaagaaaagagatttaattgactcacagttcctcatggctggggaggcctcaggaaacttacaatcaaggtggaaggggaagagctatgtcttacatggcggcaggtgagagagtgcgtgtgtgaaggaggaactgtcagacacttataaaccatcagatctcatgagaactcactcaccatctcaagaacagcatgtgggatgctgcccccatgatccaatcacctcctaccaggtctctccctggacatatggtacaattcaagatgagattcgggtggggaaacaaagcctaaccatatcatgctccaaagaattgctagaacagaaataagtagctcaaaggaaagcctatttttttccttttgaaactgaagctaaaatgctttcagactttctctctttgatacatttggtgttcccataatgagagacagactatttactctgacatattttctactagtggccacttctcatgaacatcttaaggtgaacaaggttacagctggctattttccagaaataattaaggataattaaaaagaaatatttaatctgaggcttcagaaaattggatttgggtttctcaattggtgttagaagtcaagtttactatcaaaatatttttaaagtgcattttgttttttaccactaaattttctgagttgtctcaaacctaaaattgaaacagtaccttcataataaaaccttccttctttactgcaatgctactttaggcaaagtatatataaaaatgagaatttaaagaaacctatatgatctgtactttaactcagccttgactaaatcacaagtttcaagtaactaaggactcatgaatgggatcccaggcacccaaaacacaaaaacatgatgaaaagtaagaagacgaaaatgactagagtggctttaaaatggcttatccaaaatataagaagcgtttttttttctaagtggaattttttttacgctctcacttattacattattttggttaactgtcttcatgtgataagtgcatttttttgacttaatgaaacagagtaaaaaaaaaaaaacataaaaattaccatgtaagaccagacccatcaatgccttatatacttttattggtgcagtttgtcttctatagcctttaacccccaacatccctttcacatctaccctgcagtttcctagtaaggatttctgggaatgtatatgaatatctgcagatattaagtagtgatgacacatataatagtgaggctttcagatgacatatatgagcatgtgacatgtggtagagatacagttggctctcagtgaatgatatatatttcacacacacacacacacacacacacacacacacacgcacatgaaaatagtttcattggggcttctctattggcctgtgtatttcatgaataactggcctgtcaataataaaaactggcacaagtattgtgtgcactctatctgctttccttgctcaataaagtgtgctattagaggtttctcaggcagtttcaaacttaaagatttaccttcacatttcaaaaaagtagccacgtaaaacaattccaaattaaagtaaatgtgtttggattatggcacaagcaagataaaagaaggatcttctcaaataagttactgtttgtacctcaaaatccccacatctgggaaagacacaaataaaatttcactttctttgttctgtttgttgctgagcacaatttaattgcaatcagatagaaactcatcctaatgacatgcaaagaagctaaaaatgatctttcggtgatgacaagaaactaaactttttcgtttggatagtcactagaagaaaaacaattttggagaaatcatgagggcataagcaggcagcataccatgcatgtctgggaggcaaatattatttatctaaatgaaacacattgtgggtttggcggccaacagcttccatgataaaatcagtgtgaagcagatgtgtgtctcagtagaaccgtgtttgatgttagccctgccacttgctgctgtgatcttatctataaaaataaagacaaaatacctaactttcttgtacaaggatgctgcaaggattggattaggtgacccaggcatgtgcaagcagccagcacaatgcttccatcagggcttgctcagtcaatagcattctgtcatctctggattgatctaggtctcagttttcacatctgtgagatgggagccgccttaagggtgttgggcatttccctatgattcacaaaggaaggtcatccagcaatcctagtactgggtatatatccaaagtaaatgaaatcaataggttgaaaatacactcctatgttaattgcagcactactcacaatagctaagatatggaatcaacctaagtgtctatcaacagatgaatgaataaataaaatttggtctatatacacaatgaaatattatttgaccattaaaaaattaaagttctgtcatttgtgacaacatggataagcctggggagcattaggttaagtgaaataagtcagacacagaaagacaaatgtatgatctcttgcatatggaatctaaaaagttgctttcatagaagtagagagcagaagaataataattaccagaagatatgaagcagagggggaggggagatagtaggcacttggtcaatggctacgaagctacaatttgataggagcaataagttctggtcgtctattgcagtgtagggtgattagagttaacaataatgcattgcatatttaaagctagctaggagagacgtttaggaatgatctcatcacgaagaaatgatatatgataaatgccgatcactctgatttgatcgtgcactacttacacgttttgaaacatcatgttgtaccccgtaagtatgtacaattattatgtgtcaatcgtgaataagcaaaaggaaggtgagaatgtgtctccattatgcgataattttctttgggggaaaaaaaggataataaacattatgcaaccagacagggcagaggtagatttcttttaaaggggagcaatcagagttctaaatgacatgaacatattttaaccatgaagaatttactgtctagtcaaattgatcagttattgccaagtgctttgaaggctctattatctttagactacctggaggaacattccatgtatttccctattctgttacattgtgcagcttatttagcaaacagttacgggaggtgtttttaagcatcaggaggaaaccaggttgtcaagaaagaaagttctcttgacctgtgacaacaaggcagtctctgtcatcctcagatttatgtaatgtgtaaagagattctcatttaaataattccattgaaataaaataatacaaatggatcatgacactgatttatgctttttaaggttatgttttatttgtatttgttttttctgtttgtttgtttgtttgagacggagtctcactctgtcatccaggctggagtgcattggtgcgatctcaacacactgcaacatctgcctcccgggttcaagcaattctcccacctcagcctccctagtagctgggactacaggagtgcaccaccatgcccagctaattttttttttttttgtatttttagtaaaggtgggattttgccatgttggccaggctggtctcaaactcctgacctcaagtgatccacccgccttggcctctcaaagtgctgggatgacagccgtgagccactgcacccagccctgtatttgttttttagatatgtgatagaagaagaaaatagaagcaatgtttttggatgctaatatatgccagaaactgctattttttcagataaataataatatcagaaataaccagttatgtatcaaatagtatgccaaatgctttgcatccattatgtcacttaatcctcatatgatgtgaggaagctgaagcatgaaagaggaaacttgctgaaaagaatcagaacctcaaatctattgaacactgaagctactgtatgtcaccatggtcctatagtatccaaatcgcctttaaaaacttacagcaaaatgccattggtttccattgggtggattaggaatacaatgggattacagcccatgtcataattctggagtagaaattctactccagggtcctggaggctttgacttatcaaacatctgaacattttaggattggccccactcactgctggacaatctgaagagaagccctagcagctcctggaaggggcagtttccagctttgtatccattctgctcactctcatctccactaccatcttctccacatcactgttgtaggatgcatatttgaattctccagtagattgtcctatggactctgttttctcaccaataattacctcctgaacaggctgcacctgaatcctatccctttcccccacaattttttttttcttttgagatggagtctcactctgtcacccagactggagtgcaatggcgtgatcttggctcactgcaacctccacctccagggttcaggtgattctcctacttcagcctcccaagtagctgggactagaggcacctgccaccatgcccggctaatttttgtatttttagtagagacagggtttcaccatgttggccaggatggtctcgatctcttgacctcatgatccacccgccttggcctcccaaagttctgggattacaggcatgagccaccatgcccagcccgtttcccctgttgaacagaatgcagactgactccacatgcttccagagcaagaagtccaaccacctaccctaccagtatttacttccacatcaacttgccaggctgcagccagacccctcctgggactctttctctgccttctcattcccatctttctctactgtctaagccactctgatcaatctgtgaatttccatgtccaggggaatcctcttccacccttcaacactcagggatcttggatatgtagctagagattaggttgggggccacctgctcctttcaccaactaggaagcacctttaaaatatcagaattattatcacaatgcatgcttctttggtttgtagtaaggataaatgagatcttacatatggaagagacaagtgaagggatacaagaatgtaagacatcctcatgattcattaagagatgcatgcattctccagctatggggacgcataatttttgcttttatgtttactttgggaatagtactttattttacttcatgctcctctatgaacaagagatctatagtgtgtcctacagggaaatttaattccctcttttattcttgcaaactagtaagttacaggtttagccataaagaagcaagcaggcatctctgttttcaatgctctctaaaaccaaacaatcctctggggattttggtaaaatgcagattaattcagtaagtctggggtgggacctaatattctgcatttctaacaggctcccagatgatgctaattttgctggtgcatggaccacactttgagaagcaaaaccctagaacattacaagaaattcctaatctccgtgatctgctttgtttcaaaatatttcctttcttccatctttcattagcttttacttatttactcaagccttattcccaagcaaaacaggtctcacccaattagaaagagtcaaagacaaaattgctgacaactctcttggttttctatgctactttcctcttgatcccactgaacgtagatcgtgtagaaatttagatgaaggacacatttaagacctactcttagcacggctgatacaaagtcatagctctccagtacatattttatttattaggaaaattgaatcatggaaaaataaacagagaaacctgaagaggaaaaatatgaatacagcattaaaaacataatttgcctttcaaatagaaataataccagccatttattaagtacttttcttgtgccaggcatctcatttcatgaataatgaaatattctggaaatgaattattatctgagaaatttgataaactcagaccgatcctgccttgttttgtgctatgagacattaatgggattttttgcaactgtgaaatggtaggtatttaaataggagaatgggaaattttaatttgatacggttggcaaggtgtttgatgaggctgtcacaatgacaacaaaatttaaatgcatttattgggattacctgtgctgactgaaatgcaaaagacagaaaaggattcattcacactgacttattttgaatgtgatgcaaatgtaaagagtaatatgatgtggcattatcatgatttctagtaagaaaacactgctgtttggtttgggccaaagaatgaggaaactcatagaggatggctctgcatatttctaaaaccaaaagaggatccagtacaacaaagaatcaaaaccctggacactggttaagaggagggatgaatcactggaatcacttgagtccttagtattttgctgaaatgtattatgcaatatacatccttttctccgcccaatttttgtcctggctgtgaagatagcagttctttatgctttgacatttctgttttgagtttcaaagtcagagtgataaatagagtagaagaacttaggatttagacttttaaataaagccagggaatattctattaaaaaaaataaagagaaactgttgagggacagagttactagctaatttatttatttatttatttatttatttttgagatggagtttcgctcttgttgctcaggcaggagtgcaatggcacaacctcggctcactacaatctctgcctcctaggttcaagcagttctcctgccttggccctgcaagtagctgggattacaggcacgcgcaaccacgccaggctaattttgtatttttagtagagatggggtttctccatgctggttgggctggtctcgaacttccgacttcaggtaatccacccgcctcctggccttccaaagtgctgggattacaggcgtcagccaccgcgcctggtcagttgctagctaatttatatacttttattactgttgtttgttttaagacgaagtcttctgcctgctcacactatacagaatgagcctacaggaacaaaacataagaggtgcaatttgaggactgtcacctctgcctgagaaagtatctccatgggtgcttattaataatgatatattttaaaaagttgtaacagaaagttccaacaggttgaaaacatattatcttctcattgacaaaacagatagcatttattataccatgtgtggcaatttatttggcacattgtggcatccctttttcaaaggcttttcttgccagcacattcatttacctcttcatgatttttttggtcttatgtttttaacaagactgagcagaaagttgaagactatgtgatagatcccttgtcatcttccacagtgcttaccatataatgattggtatagataatcttatggatgtcatgtcttcaatatggcttataatgaaatgatagctaccatttcattgagtgtttcctatgtgatagacattctgatgagttttgtacacatataattgacacatcctacaataatgcagctaaggaggtattatttttaacacatgagaaaatggagtcacagagacttgaatggtgagtctcatttacataaatagaaagcagaagagccaagttttctctgactccaaacgtatgtatcatcacccccaatgctagaaaagtatctaagaagactatatttaagaaaagcctcatattgctggcctatttgattttagtctgttgttttgtcaatccaatctaattccacatgccaaaataattgtcacatgttagtctaaagctaacttcatgtctgatagcctagagcagctaccacattcatttgctaataaaatctgtcctccgtagtctggctttcaagatatttatccattaattaattcaaatctcatctttactcattctcctttaaagctcatcagatcatttttaaaaataagtttctgccaatatcatgtaaattcagcaatcacagtccatctgcaactcccccatatgtggagggggcctagttatatggtgggaaaaacaactgggcttgaaagtttttagtacattcttacagcaacatttcttaattccctgaccaagctgtctacaactgtgcacctatctccacaattattttgtatctttaccctgagttatttttcttcataatactaattaactgtattagtaaggttaagtaatgctacattattctgtggaaataaacaaacctcaaacctcagttggttatcataataaatttttttgtgtgtgctttccttatagcctgatatgcatcagatcttcctcctctatctccttgctgtgtgatctggaacatgtaaactctaaagagaagatgacaagaagagatggaagaggctgttcactggcttggcttgaaagtgacgtgcatcacttttgttcaccagtcaactgaccagaacttgtcacgtggccctaatctaattgcaaataatgcaagggaatgcagatgagcatatgtacatttgttacgcactatctctgtcacattacctcacagaacagtatatatttatttgcttctctcccctctctcccttcactaaaaaattcatttatatggctacagattttgttgtattttccatgccaataagatcaagtagaacagtggctggtacacactggtacacagtgggtactcaaaataaattgttgagtgaaagaatacttgtaagtgattaaagatggccacacattctttgatggttctttcgttgagaagtggcatgaatttatgataactgtgaccaaacaatacggcagaagtgacactatgctaactgtaggcctagcttgcaagagagtagacagtttccactttcttcctagtggggcctatcctgagtccaggaagcacatgctagccacttggggatgctgcatggagagagagagagagagagatctaaacaacccccagctctttcagtaccttctgtttatcttttttttttttttttttttttttgagacggagtctcgctctgtcgcccaggctggagtgcagtggcgcgatctcggctcactgcaagctccgcctcccgggttcacgccattctcctgcctcagcctcccgagtagctgggactacaggcgcccgctaccacgcccggctaattttttgtatttttagtagagacggggtttcaccgtgttagccaggatggtctcgatctcctgacctcgtgatccgcccgcctcggcctcccaaagtgctgggattacaggcgtgagccaccgcgcccggcccagtaccttctgtttatcttatgtgaggtcacagacattgcagagcagagatacatagttaccctccaaatccttgacccacagaataatatataacaataaataaatgttgttttaagcccgtaagttttggtgtggtctttaatattatgcagcaatagataattggactaatattcatgatgactgacccttgcatgttcaaccccagtacctacagtctaaactatacacatttattatctctaaggaagaaaggctcaatgtttttaaaagatgcctattttttcgtatcaatgtacaagtgtttctattctgtgaagtctttaccctctttctggtcaaattttgaagactgtcttcttttatatacccagaaagttctgcatggatacatcctgccatagcactcaggacacctgattacttctgtgtgtttattcttttgctgtaatctgtacaaggatgttcactatgtgacacattccaggacacattctcagtgacccctagtcattctacactctttaccttccactccaggtggcaatttgaaacacaagtcaaagagagtgatgttcttacaggcatggtttttaacctatgcccatgaattaaaaacaatttaaaaacccaatctttcactttagctgttgttagttaatctcacttgtatacacattttacaagtgactctcatgcatcttgcagcttatataaccaccaattcagacaccagaggtgacagtagctgctataatatactcattggtttaaaagtgtttgttttcctattagttgcaaaacttttaagggcaggcagcttgagtcccagttacccagttgagataacccacatctgctaatatttttacataaaagtcagtgaaaatataattggcaatgtcatgcaaaactggaaataaatatttactatttttaagccattttggtctataatttaatcacaagatcgttatacttggaatgcaaaaggattggatcatggtggcactattttaaagtctcatttaaatataactaaatgctgcaataggtggtcataactgtagtttgactctaattaatataaaataattggagagtaaatttatccccctgttccatatcaatagctctttggctacaaggcaaaaagaatgtgaacattttctcggtatcaataaaaattagcttaaatatctaagtcaatttagaaatgataaatcagtctccatagttaaagaccaaaattttaaataaccatattaagcaagactcatatatttttaggaatgctctcaaaataaaaatctctcttacaaaccaaaggaaacaaatatagttgaataattctataaacctttcacaaaaatatggcattatggcataaggcaaatatgatggttcaaccagctaagtaaacactgattaagaattaagattgaccacagcaataaggggtattttcctctagtcaatcactcaggttcagaaataccaaatttatcttaagacattctaattaggcaaaactatttgatagatcgagtagttggagatcagaagcatgcatccaattaagaagaatgttattgaatgattttcattcactggcctcttctgttctctgtattttagtttaccttcagcacctcattgaagagagctatatccaaattcaatttattgccccaagacctctttcaaaaaaatggctctggagattcccagctagaaaaacttttctcttctcctaagcttccataacatgcatcagggatttggtatttctccctctgaattgtaattgtttctaggcactagcttctctgccagcctggaagttccttaaggagctgagcccatgttttattcatggttgttcctctgtggggcacagcacttgggcttcccttctttgagcatcaaaaacaagtgtcatttttctttcacttattttcacatccatgtcctcttctaagacctttgcaagtcattcgtagttttaaagagactacatttaagttttgatagataagcaaggtaaatggcaagtccagcagtatagagaaaaacctctttcctgtagtggtatttgttatatattttatctgaattttgaggttcatttgttttcattattgacagatgatttctttgtttgtttaataaaaagcagtaattaattttcccttaattacatgttttacttgccactagctggtgtatctagggattcatattgtaaaaagaaatggaactcattggtttgaatcataatgtgtgggggtatagaggttatttaaatattgtttagttctttttttttattttacacataatagacaattctcaaaatggcagtaaggaaaaaacaactcattctttatattttgaaaatttttggccctgaacacaaaactttaattgtaacctttaatttattaaataaaatattgagcttctaaaacatttgagagtgtgcagcatattgcaaaagatacttggaagaggcaagctgatcttgctccaagaagcttctggttaaatatcaatatgatgaggtttgaaaaaggtacacacaaccactacattacagcatgaagtaagatttaggctgcaagagagatgcaagttacaaatatgaaataagtttgggctgcaaggaaaattgactctggcacaagttcaggagcattttagattagcaaagtagaattgctgggagttcaggtcttagatatttcataaaataactacacctcaatacattggaatttagaaataaagagaccattagtgagattccatttctgcaatattgttttttctaactttgtcccttgttttttgtctgttcctatcctagtataccaaattatcatcatattccctcccatccatgattctagcattttagataaatcgtcttgccattttccaagcgtttggaattgaggtccatgctcatgcccttttctaagaattccaaactccttgagcttaatcttatatcttcttttaatatccctgaactaaatgactctaatctagaatttgtacatatgaccaaaatgacaaaggtacttcccatgaatccccaaacctcctgatattgtatataaaattgtgaattttcctggagttagactacatgactttggttaaatcctcaaaaggagctcctgccccactgaatttaagaagttttagtacttacagaccattggggatatattacacacagaggaggtacaggcaatgtcttacaaaaggcacttgtaatggcagtctttatgatttctaggaagtatgcagaaaaatttcctgaaggtaatggtcatccaaaaagtcaccatggaatctcttctcctgcaaggaattcattactgagtaactccttacctcttggtataattttggcatggagtgaaaggtctaacctctcaatgctgtttccccttctgtacctcctctgtctctttcaggcttaataggatcatctgttgacttgaatcagagtcacattcaaagctgtgaccatcactgacttggcactgtctgtatctgtgtgagtctccaggagaggtgctagtgtctggggctggaagggtgtaggttgctggtaattcagccatgtgcatttgctcatgaatatgtgtataataagagagagacagagggggagaagaagtggagaggggagagagatgagagagagaaagagagagatcaatctgagagagaaagatatgtatacacacacacacacatacacacacacacatatatatatatataaataaaaatctgagagagagatcaaatctgatctgtaattgtatccacttcagaccaaagggaccacacagataaatataaataagtgaaaagattcagtggggtcaatggaaatcaagaagagggcagtcttggcagtttcttctctattctcactgatttcattgattaaacgagaaactaatgtcaagtcagagatatttttatgcaaagctgagaatatggatttttgggtgcaattttccaaagtctatgcattaacaactaattaaaaacatgtaaaagaatatagagcacatagaggaaaattttctcagtttgataaagaatggctacagaaaacgtatagctaacattgtacttaaggtaaaaaaatctagacactttccaattaaggtcaggaacaaggaaggattcctctctccacttcttttcaacattgtgctagaagtgctagctaagaaaaacaagacaaaataggaaataaaatgtaaacaccttgtaaatgaagaaataaaattgtctttgttctcagatgacatggtcatctctgtagaaaatacgaaagaattgataaaaacaactcctggaactaagaagtgatagtaaggttgcaggatacaagattagtttataaaagtcaatcacatttctatgtaccagcaatgaacatatagaatttgaaactaaaagtacagtaccatgacattagtatccaataaataaaatatctaggtataaatctagcaaaatatgtacaagatctatatgaggaaaactacaaaactccgatgaacaaaatcaaagaagactaaataagtggagagctatcccatgcttatggataggaatactcaatattgtcaagatgtaagttcttcccaatttgatctacagatttaatacaatcctaatcataattccatcaagttattttgtagatattgacaaaatgattttgtagatattgacaaaatgtagatattgacaaaatgtagatactgacaaaatgattctacataatattgacaaaatgtcaatattacgtagatattgacaaaagtttatatggagaggcaaaagatacagaatagccaacacaatattgaaggagaagaacaaagttagagaactggcaccactcaacttcaagatttactataattaagacaataaacaaagaggctgggcatgctggctcacgtctatgatactagcactttgggaggctgaggtgggcggatcacttgaggtcaggagttcgagatcagcctggccaacatggtgaaaccccgtctctaccgaaaatacaaaaattagccaggcgtggtggtggacaactgtaatcccagctactcaggaggctgagacaagagaatcgcatgaacctgggaggcagaggttgcagagagcagagatcacaccattgcactccaacctgggagacaagagtgaaactctgtcaaagaaaaaaaaaaaaagaatagacaaagaggtgaatggaatagaaaaaagaattcaaaaatagtcccacataaattagtcaactggtcttttacaaaggagcaaaggtaatacaatggagtataaatacagtcttttcaacaactgcttctaggggtgccagactcaacaaacctgaatactcacatgcaaaaaaaaaaaaaaaaaaagaatctagagacagaccttatactcttcacaaaattaactaaaagcagatcatatatctaaatataaaattcaaaactgtaaaattcctaggagataacatagaagaaaacctagaagaccttgagaatggtaatgacattttagatacaacagcaaaggcatgatctatgttggaaatcattcatatgttggacttcattaaaattaaaacctttttgctctgctaaaggaaatgttaagaaaatgcgagacatcatacactgcaagaaaatatttgtaaaagatacatctgacaaagaatcattttccaaagtatacaaaaaactcttaagactcaacagtaagaaaaaaacaacccaattaaaaaacatgttaaagaccataataagaagcacctcccaaaagaagatatacagatgggaaatagcatatgaaaagatgcttcccatcatatgtaattacaggagtataaattaaaacaacaatgagataccactagaaatgtatttgaattgccaaaatccaaaacactcataacactgaattctggtgaagatgtggaacaacagaaactcctatgcattgctgttgaaaaaggcaaaatggtacaaccagtttggaaaaccttttggcagtttctataaaaactaaacataatgttatcatatgatccagcaattgtactccttggtatttatccaaagaagttaaaaattttgactgcagaaaaacctgcacatagatatttatagtaggtttgttcataattgctaaaactggaagcaaccaagatataccaagaaaccaaaaaactgaaagtacaaaggtggtacatacagacaatgaaatattattcagcactaaatataaatgagctaacaagccacaaccaatatggaggaaacttgagttcctatatttaattcattctccctattactaagtgaaggaagacagtctgaaagggttgcatactgtgtgcttccaactgtaatacattctagaagatgaaaaattatggaaacagtaaaatgataagtggctaccaagggttggcagaaagggataaacaggtgacacacagaggattattaacgaagtaaaaaatactctgtatgatactgtaatgatggacacgtgtcattatacatacatttgttaaaacccctagaatgtacaatatctagagtgaaccctcatataaactacaaactttggggaattatgatgtgtcagtgtaggttcatcaagtgcaacaaatatgccactctggtgagagacgtaaataagaggagaggctgtgtgtcggggtgggtagggaacatatgcagtatctctgtgtcttcctcttcatttggctgtgaatctaaaactgccctaaaaaagtctttcttaaaaagagtccagaacaaagacaaaacgtacatttgttgatatggaacctaggtagtctgaagtttgcatactttcatctatagcttaatctccccacctattttcctccaccatctttgtagtaaatttgaactattctgtatctacaaaaaaaagccttgaaatttcctcacagcttattcttataaaatcctctcagtttacaattcgttctcttgactgttctacttccttactctaccagtcccagattatccgcctccatgatgaatcattttttcttctaggaccatgaaacatataatctctatcatctgcatggcaaattgtcacgtatttgtccactgggtattctttctgatgttgctgttgttattttcacatgttcatgtgtctgtctcatttcccttcattattcattcatgcattcattcatttgccctacatacacccattctatattctgcatccttgtgcttgacactgaagattagaccacagagcaagactctttccatgctttgtaactcaccgtaagtgtacttctaatacacaagatcaatcaagaaggctattataaacctttgtgacctgaaaccctctgaaggctgtttgtattgatatggtggtatggactgaatgtttgtgtcccctcaaaatttatatgcagaagccctaaatccaatgtgataatattgggaagtggggcctttgggagataattagatttcgaggaagtcatgaaagtgggttcctcatgatgggattagctcccttatgagaagagaacagagcaggctctctctcagcctaaggtctgactgatacacaactggtattcagaaatatttattgtttggttacttattctcatttgcaataagttataacatattaacaatatattcctacatttcacagtgtggatgctattgttgttgccactgggtatctatgtgggaactaattgaggaccacatttacaatgtgcccaaattgtaaatgtaggagtatctatgtgggaactaattgaaccactgagtatctatgtgggaactaattgaggaccatgtttacaatgcgtacaaatcataaatcaattagttcatattgatttacaaacaaggaagaaaaagtatttgtttacattgatactgtccatgtaaacttttttcaattcaaaagaaacacatagttctgtcataaagtagattttctatcccttttattttctgagcttatttcagaaagcacttgcaatagctttgcacagttcagcatttatgaaggaaacctttgttagcctaaaatgtagctgtaattttttttcaaataatttctacacaaagcttttacaccttatttgattacctcaattttttcccaatgagtgaatacggacttaaattcattttttataaaaagcattaaccattgtttcttgtaattacactcagtgagagtcgaacaatagtgtctccatttgaaacagacttttgttataaggttgaaattgactttaaattcttttgaaatggccccaaaataacacatagcacagtggtcgtctttgaggtgagaattatgtgtcttattattgagagattggactgtgtttcacagaaaaattctcatgacctactaatgtgtttcagtcaattgttctgaaagcacaggataagaattgtaatgataatgatgaaaatatatgaagacattgaaaactgaggttctcattgttatagcatgtcagttatctttatctcattcaacagcatattttaaaatgtcacactgatttccaaagaaggaagaaaaatttaaagagttcaggcaatgcatgctagttaaacttattgtgataatacattcatagacattgaaaatattggacaaagaatgaaaaaagagagaagaaaagcatgcctaaagatagtcagtgcttggccagtatatatcttagggcagaattcaatgactcaggttgaaaaataaaaacctatctagatattttgggtttcttctctctctgattaatcaaaatacaacaaggcagaaatgaggaaagatgcaaacttttagtggccaatgaggaaatataccttgggggcatatatggtgagtccaaagattggtggccaagaataatagaaaaagaagagatgcagtagaacaagaaggacatatatcatcatttatctctgctccatctctccatttattctgcaagtgatgggcgcaaaggaagaaaacctgtgcaggaattaaaggggcagctctacagagtcactgagagctcattgtccagacttggataaaaatgggttcctagtcctgcctcagtgagtattacttgtgtccatgatcatgtcacttactgcttctaaactccatttgtttcacctgtaaaatggggataattatggtccctaaatcatagacactggagatattaaatgatataatgcagaggaagaggactgagtcaatgtctggcatttactaagcctccagtagagcctagccataaggtttctattataattaaaaacatataaggaattttaaccattctttgataagtttagttacccaaacttttttctataataagctgtcctataacactctagaactgaagacatgtatcctcagccacactatgtttgactcagctgtagagagctgtcttgcccaatgactgactgtggtaggaacccctgattcttctgattaaaaatgatattgtttgacagtgtccccacccaaatctcatcttgaattgtagctcccataattctcacgtgtcatgggagagacccagtgggaggtaattgagtcatgatagtgaataagtttcatgagatctgatgattttatgaaggggaattcccctgcacacactgtcttgcctgctgccatgtaagacgtccctttgctcttccttcatcttccagcatgattgtgaggcctccccagccatgtggaactgagccgattaaacctcttttctttataaattacctagttttgggtatgttattattagcaaagttacacaagataactctgacaccacagaactccctgaggtgttgattaagactttgtgggtctaaaaatatccgactttttcctctgagcaattgtacttctgtactccctcttccagtgacgttaatctctaatcctgaatgctgaacttctggagaacccaatctggttcattagcgccaactattcaaattgtcttcagggagctagtgctttccttctttctcacaaaattacatggcttacattttctgctgctggggaaccctcagccatggatcctaaggccaaggatggacggagaaattccctgacagtctattctaggaccatttgaaaaagagggacccgagaccacaccagagaaggagagagttggggacctaagtcctggggaaaggaataacaggaattagggcctgattactgatctgggcctgctatttttaaggaaagtgtatttatgggatagaggggagggggaattattcatcatgatattagttatagattctagagatctagagaaataagcagaaaataaaaactacaagaagatgtttaacctagaaaaatgaataattactaattaatttatatgcatctcttttcatttcattcatttatcactttagtcactcaacacaatttaactgagaaattatacaacatgagacactgtggtagactgtgtggggtgaagcgttgactgaaacctggcccttgtcttaaaaaaagaaaaactcacatttttgcctcattatcttccataacaacataaatatattttattatacatataccagatacattttgtttgtcctaatcaattctgtcttatgggaacaacctatacctaaaaagattggagatttgtatcacataaaatgataaaaattttgtttcattattttatagttatagctcagaagttccagtttcttggtgttcttttctggtattagaggtacctgcttaaacttttacaataaagaatgaaagcattggctaaatgcattcccagaggctttgaataacaactctggcaactggtttgcccacaaaattgagctgatttataacagccttaaaaaattaattaaatgcataatatatattagctgaataatagactgagttgggaaggtttttcagtagataatatcttgcggttaacccagaattttttccctacacaaaattaggggcataaattactattttatttttagagaaactgtaggcatcagactggatgttacaaaacagcttcaataagacatagaaggccattgcattcctcagttaaagggaatgtttgttgcaaagataattattcttttcacaaacacctgtgcttccttttcaagtgcagagtaatactaggcagtggctgcccagccaagaacattacctgctccggttgcatataaaggagtcatgtgactgatttcagccaatagaatgctcataagtaagaatagttaagaagtaatggggaccctttccaacttctctccctccaaatgcaagcatctagctaagtactcagagtcctgaagagattgctgaagcaatagctgggaagagactcactccttaaagaattgtttgaaagaaaacttctcacgaatcagaaacacctgtttagactttacaagcatgagctatctccttctatttgtatatttatttgttacagcagcaagcattaccttaaagtatattgaaagcgtgtggttgaatgtgaaaatgttgtacggaaagatagggaaacatatgctaatgacaaattgggtccaagataacgagcctgttaaaagatatgcacgtcttttaaatgatcgaatagaattcattataacattttattcccagtaggaaaaattagatttctaaaagaatggtagcacttgtggcaagatcttatgttgcaagtacagtagatgaatgaagagaaactgcttaacccccattctcttaaagattaacatttataatttgtaatttgcctttttacatgtgcatctgtattaacacatgcccatctgaaaatatattcggagctttaaatatatactatagggttttgtcaagaattattaaaggagataggatcacatttattcaatgtgataaataattctagaccctcccatttggagaagaaaagaaacaaaaatagtttactggcttataatatgcatgcataatttttctttttcataacacaataataatgatacaaaaaacactataatcctatataagcaaaagtgcttagttctgggtcaggcaaattgaaagcaaggtggtgagccagactcagcaccatattgatgagaatcacaccttaatagatggagaagcaagtagaaaggggtttagatgatcttacataacagaggcttttaatcaagctggaaccctgcctacctctaaattattacataggagaaaaagacttttattttaaaaattcaattgtattttaggacctttctgtaacaacagtgtgatctatgcctaaacattatatgatccaaattgtgccccttgaaatttcttatgttgaagccttagttcccagtatctcagaatgtgactgtatttggaaatggggcttttaaaaatgtaattaagttaaaatagagtctttagggtaagccctaatttaatgacttgtgtcctaataagaaaaggagattagaacaaaaacaacacatacagagggacaaccatgtgaagacacagcaggcagatggccatctacaagccaaagagagagccctcagaagaaatctatcttgttcacatcttgatctttgacttccagcctctacaattatgagaaaataaattgctgttatttaagccacccaatatgtggtacgttgctatggcagccctggaaagtgaatacaaataatacataattcatgcattcattccttcaacctttacttagcactaattttgtcatatgtcctgtgctaatggatgtagatgacaatgtaaattaaattctcctatgtcctcaagcaaatcacagacaaatggataagaaatctctccttccattatacagtggctccttattatggaatcttgctatttaaataaaatatattccatcagtgataggttaaatggtgttctcccaaattcacatgctgaagtcctagcctctagtctttcagattgtgactgtatttggaaattttgtgactatagatgtaattagttaggatgaggtcagattggattaggaggccaacctaacccatatgactggtgtattagtcaaggttctccagagaaacagaaccaatcatatatgtatgtgtgtgtgcatgtgtgtgtgtgtgtgtgtgtgtgtcacacagagattattataagaaactggcacacaattatagagtcaaacaaattgcaagatctacatggtgagtctgcaagcaggagagccaggagagctggtgctatagtttttgtttgaccctgaagccctgagaatcagcagagccaatctttcaacttcagtctgaaggccagcaggtgccagacccaggaagagctgatgtttcagtttgaatttgaaggcaagaacaattcccctttacttgagggagggtcagcctttttgttctatttaggttttcaacaaattggaggaggcctgcccacattaggatcattaggaggatgatctgttttgctcagcctactgaatcaaatgttaatctcatcacaaaacattcttacagacacactcagaataatgtttgatcaaatatctgggcaccccatggcccagtcaagttaacacataaaattaatcatcaaaactgatgttcttataaaaaggggaaatttggacaacaaaaaagacaagcatatagggaagatgggacaatgtcttttaccatgagcatatcaggctaccagatgctagggagaggcagggaacagctcccttacagccctcagaaggaactgactctactgacaccttgattttgagctcccagaatcaaaattcttgtcttacagtaagacaataagtgtctgttgcttaagccacccagtttgtgcaactttgttatggctagctttaacaggttacaccatctattctacactaaagttaaatattttaaattctggaatcagtaaacaaaccctgctacttgccatttggggttaggggagtaagctatgtcagtccttcacagtttcttttcttgatatctttttatcagcaattcactgatatacccactattctttcaaccaacacttattaagtgtcttcatccatatctcttgtattgtgctataaagcttatgataaataccactgagcagaggatgctaatcacagagttaactgtagtgtgattcttggggatatgtcaaacaatgaactgagactgatttatctttatgaattcaagttgcttatatcacaccagtctaaagaaaataaattccaaaaataatatcacttttaaatcaaaattgagagacaagaatatcaaagagactggatagactctaacttttatcaaaaaatgatgtagataccagtgggaaaaaaatagaagattcttagaagatggttattttagagatttgaggggaagtaaagagaagagagaataaaaaaattcttaatcaaatgactcaagtttatattaataatatgaaatatttttaattatctcacaaactgaatacttgcatccgagtgtccatgtcaaggaaacaattttgtgtttaaacctctgcagatccaaagattcatactaacatctcaatggttgaaaactgtcattgaaaggaaacttgaaaataattaattcttaaactgcttaatttttcacttttcatttcacggtttgtcactaaaatagtaattattttttcttctcttgctaatccaacaatttcatactgacagcctttcactgggaaatttactttcatattactgctttacactttaaatacaaatatttttcaagatgaaattagatatgttggcaagaaatatgatctttagttaatgatttatgtttctgctttggaaaaagaaatgtctcttacatatattatacagacaagtggcttccaaacattctgttgaagtgttcaaagggaatgctttatgattattgctcaataaaaatagtgtgttggcatttttactcccgttacctcacaggaaaaaaaaaaaaagaaaatgctgcaatagtatgtcataacaattaatagtatgtacactggattttggtagaccaaactataagtcctggattttattttaccaattctgtggtttaggtaagtggtttaccatttatgctatagttatcttagctataaaataggaccattggagtatacacctctgaaggtgtctggaaagactgaataggaaaattcatggaaagaacttatatagaagggaaataaataagtgctcaataattgttagttgaggctgtaataataattacttattgagtgctattcaagggccagggattgggctatggagtaaagacataaaaatgaggaattcacatgtttctgggacctcgctaaatgtattgtgaaattaaaaaatggcggtatatgtgaaatcactttgaaaaagaaaaaaactctacataaatacaagaaaaatctctcaagacagatagtagccaatgcacaatttaattccaaaacatgggtcagcttcttactttggaatgttatagttttaatttaaattattgccaatatttaatattaaatacattgaccacctgttcattaattgatgaactcaattatactatcacttatgcattctccaaacatgtacaagtgtccactctgtcatgggaactccccagccattctggcagccctatgttttgtttctcaagcacgtagtcacacctttcttcccctttaatgtcagcttattttttcttcttggttgactttctaggggtgttctatgacacgctgagcagcttgtggtgaacgtacaagtgtcttaaaataatcgagtgtccctacactaccaaagtgttaaatctaattgaagaggccaccatgaaaatgagtatctggcacagccttggctgggcttaggaaagcaacaatttgagaacctagatgttggcagatgaccgtattaagatctactggaactgcatttaaagatttcatatgcatgacaaagcccatctactcctacaattggtttgatttacagcccaagataatggtgcttctagtatctcaaatactaaaaaaatcatatttaattgctttaattcactattaatcgattattataatgtactgctaaaggacaattctttctaagttctacaagcacaaataacatgaccatattatctttccaaattgctgactgtacaatattgtgggaatataaactacaatataatccagtggtttagtagctgttactactgtgaaaaaaatatttaggaggtcattatatcatagattggtatcatttgtctatatatatatatatatatatatatatatatatatatataactcaattttattttaaaaaatagtaaaagcaaacatcacatgaattaagaatgtattttatactttaagatttattttcaaaatgtgaatgtaaatcagatcttcccatcacgaccccagaagaataatgatttattttaatatttgtgattttaggatttagatactacctacttaccaagatactcacttgtaaaatatcttttaagaatatagaggcaaaatagtgtagcatagaaaacacattgaaagttcatattaatagccccttcgagtttttatagaccctagggtaaaaacaaacaaacaaacaaacaaaaaacctccatcccttgcctcagttctcattcatgtggtttgtttataggatcaacaacaccggtgggaaattttacagtattcttcttattgtgggcagctctgatggctccaaggttctttcttgtgctgagcaggaacctatttactgtggcttccattcagtttcagtattccttttagggctaaggaaaataattctcagaagaaggccaagcaacatggtcaaatagaagcacccagcaattatctctcttctgcaggaacaccacattgaccaactatacacacacacacaaaagcaccttcttaagaatcaaaaatcaggtaagtgatcacagtagctggttttcacatcatattgaggaaagaggcactgaagagggtagaaaagacagtctttaatcacctataccatccctccccccatcccccgcatccccctcatcccctggcatgtattgccatgcggcactgagagaatgtctgcgcctggggaagggagaatgcagtgattgtgagacttagcattggaactcagtgctgtcctgtcacagtaaaaagtaacatggggtggaagtcagccttcatccacagagggagcatttagaccaaccctagccagaggcaaattgcccgtcccagttgtcagaacatgagtttcagcaagccctgccaccatgggcaaaaggactctggggtcctacatcaacttgaaaggcagtctaggccatgaggactgcaatccctgggcaagtcctggtcctgtgctgtgctgggctcaaaggggccaggggacttggagtgcatgtgacctggtgagataccagccgggatgcatgagggatgcttgcaccaaccctcctcaaccctaggcagtatagttcacagctccaaaagagactcattccttctgtttgaggagaggagaagggagaacaaaaagaactgtgtcttgcaacttggataccagctcagccacagtaggacagcgcaccggacagagtcctgaggccccattccaggccttagcactcagatgacatttctagacacgcattgggccagaagataacctgctgccttgaagggaaaaacccagttctggcaggattcattatcttctcgctaaagaacccttgggccctgaataatcagcagtggtagctaggcaatacttgcctctgatcttgggtgagactcagaggtgtgctgacttcaggtgagacccagcacattcctggctgtggtggctatggggagagtctccttctgcctgaggaagggagaggaaagagtaaaggggattttgtcttgcagcttaggtatcagctcagttacagtgagatagagtgccaggcaggccctagggttcctgattccaggccttggctcccagatggcatctctgggtctgcccggcattaggaggaactcatcatacttaggaggaactcatcctcttagaaagaactcatcacactaaaaggaaggacataagcctggataactttgccacctgctgagtgtagagcccttggtccatgagtgaaaataggctgtagccaggcagtagtcactgcaggccttaggtgagacccagtgctgtgcagtcccagtggtggtggccatagggatgcttgcattacccctctcccagctccaggaagctcagcacagagagagaccctgtttgtttggagggaatgtggttctgaatcattatttaggggaatattgtctgaacatggtctactttgaagtttctcaccctttctcataatatgtcccatcaacataaatattatcaagcttcatttcctataattttcattatgttgcccaaatgaaaatattctgttgcaaattattgaaatgtaaaattttgtattaaagtataaattatttgttaaaatatttaaaatatgattggttattctacatacagaaatgtctttggatatctcagtatgttctcatctttcccctgtcctatcattattcttccagtgactcatgccaagaattgatcacaatgctccaagggtggtctgaccagcagggaactgagcagaactgaacatggcttcctgttttctgtacccaatttctttccctttttctggtaccactcatgtccacatcataatcatcttttgcctgaacaatctcaacaggctctgacgtggtcgtcctgcttcccccatgaatcctgagtgtttaccttccacttagtagctaaagggctcttttgaactcataaagtttatcaagtcatcacctcctcaaaacgttctatacacttcccataataatgagcatgaaatccaactccataccctatgtggtctatataatctccctttcctcagtctccccttattccattctctcttcactcatgaatttccagccaaaattttcttctaatgtctcaatgattaggtcaagcaggctccacacagtagggtgtgtgcactgattgtctttgtgtggaatactttctctctctctgcatatttacatggctgtccttttcttgtcatttagattttagttgatatccctcctcttcaatgaggactttcatggcctccaaatagtaagtagcttctttcatcaacttttatcatgtcaccctaaatgtagtaatagtacttgccaccataaaatattcttatttatttgtttattgtctagctgtctaatgaggtaagacccacaacagcagtaatcttaataattttatttagaataatgtttggaatataaatattgttgagtgaatgaatgcatgcatgcatgaccacagtatagatgtgttattgtatatgaagctattaagatcaaagagtttgagcctgggcttgaattgctgatctacatttactatggtgagtctaaacaagttacttaacctatctgtgcctgagattgtacatctaaaaaaggggcagataaaaatgttactttcttctcaaggttattgtaaggattaaataaataaattgctctttgtaaaatgcatagataactactgtataaatgtagcaataaatagtagtacaacccaatttttagaattttggcagccacactattgactcatattacacctaaagtataatgtaaattctctaagtttttttttttaacgtgtgctgctttgaagtctcacctctatatttttgtgcttacacagctgccttttagaagccaactacaggattttatattggtccgctttatttggtttcattcagcacatcattctactctgttgacaatgctgaaggttttgagttattgattaaatgtcaccttggatatttgaaaccaggacttcaatctaaaaatctaagctacttaactcaagtgacctcagtctagaggactctgagtattcatggggccagtgtgttgtcttctagcagtttcctttcacttgcccggagaagaggcctgtgaaggctggccctgggtctgtaaaacacataccagaagtgggagaggacataggttaaaagcagattgacagaggaggatcaaagaagccataagtatacctcagctgacaatgaccaagcttatgggaagaagatacagaaaaatagaaatttggatgtagagcaaatcttattttttcactttttattttgaaataatgatagattcataggaaattgcatagttagtacaaagaagttctaagtacccttcacccatttccatcttacatagtacttaacaccaaaacacgactttgacgttggtataatgtgggtgtgtagttctgtgtcatattagcaaatgtgtagatttgtgtaatcaccactataattaagataaaaaatattctatcaccacaaagatctctcccacactttccttttacaatcacgtacccaaaccctcattactcctgactctgggcaatcactaacctcggatccaactcgataattttatcactgagagactactatataaatggaatcataccagatgtgacctttcaagattggagttttcactcaatataatgcccttgtgatccatcctagctgttgtgtgtatcaatagtttgctcatttttattgttgagtagaattccatgctgtggatgtaccagagtttgtttaactgctcacccactgaggcatattttggtcttgtttttggcgattaaaaataaactgctgtgaacaatcatgtgcagattgttgtgtgtctaggttttcatttctctgggataaatgcacagagtacagttgctgggttgaatggtaactgtatgtttagatttttttttttaaagtgtccaactagtttaactagttttttgagtggtgtactggcttatatttccattgtcacagtttttactttagctgttctaataggtatgtagtgatatctcattgtcatcttaatttgtatttccctaatgtctggcaatggtgattagcttttcatgggctcactggacacccatattttctttatgattaagtatgtgttcatatctttttctcattttctatttgaattgtctgtttttactgttgagttttgagattttttttttttttttttttttttttttttgagacagagtcttgctctgtctcccaggctggagtgcggtggtgcaatctcggctcactgcaagctctgcctctcaggttcaagcaattctcctgcctcagcctcctgagtagctgggactataggcgccggctaccatgcacggctaattttttgtatttttagtagagatggggtttcaccgtgttagccaggatggtcttgatctcctgacctcgtgatctgcccacctcggcttcccaaagtgctggaattacaggcttgagccaccatgcctggcctgagttgtgagtttttaaatacattctagatatgaattctttgttagatatgtagtttatcaatatcttctcccagtctgttgcttgtcttttcatcttctcaacagggatttcaaagagcaaaggttgtttaattttgatgaaatcccatttggttattttttcttgtatggatcatgtctaagaactcacaagtcccaggtcctgaagattttctcccatgtgacctgctacaagtttcatagcattacgttttacatttaaatcaattgttcattttaagttaatttttgtataaagggtgaagttaagattgaggttcattctgtttgtttacctgttgtccgatttctcaagcatgttttgaaaagattattattcctccattaagttgttactgtttctgaacctttgaccaaaggtggttgggcaaatttgagcgtctttttgggttctttgttctgtttctttaatctgtctttctgccataccacacaggactattgctatatactaagttttgaagtcatgtagagtaactttacctacgttattattttgcaaagtagttttagctattgtagtatacttggctgtctatacaatttttagaatagttttgtctatgtgtatatatatctgttgggattttatttatttttttatcttttgattttttaaattatactttaagttttggggtacatgtgcacaatgtgcaggtttgttacatatgtatacatgtgccatgttggtgtgctgcacccattaactcgtcatttacattgggtatatctcctaatgctttccatcgtccctccccctaccccacaacagtccccggtgtgtgatgttccccttcctgtgtccaagtgttctcattgttcaattcccatctatgagtgacaacatgtggtgtttggttttttgtccttgcgatagtttgctgagaatgatggtttacagcttcatccatgtccctacaaaggacatgaactcatccttttttatggctacataatattccatgatgtatatgtgccacattttcttaatccagtctgtcattgatggacatttgggttggttccaagtctttgctattgtgaatagtgccgcaataaacatatgtgggcatgtgtctttataacaacatgatttataatcctttgggtatatacccagtaatgggatggctgggtcaaatggtatttctagttctagatccttgaggaatcgccacactgtcttccacaatggttgaactagtttacagtcccaccaacagtgtaaaagtgttcctatttctccacatcctctccagcatctgttgtttcctgacatgttaatgattgccattctaactggtgtgagatggtatctcattgtggttttgatttgcatttctctgatggccagtgatgatgaacattttttcatgtgtctgttggctgcataaatgtcttcttttcagaagtgtctgttcatatccttcaccctctttttgatggggttttttttttcttgtaaaaaaaattttgtttaagttctttgtagattctggatattagtcctttgtcagatgagtagattgcaaaaattttctcccattctataggttgcctgttcactctgatggtagtctcttttgctgtgcagaagttctttagtttaattagatcccatttgtcaattttggtttttgttgccattgcttttcgtgttttaaacatgaagtccttgcccatgcctatgtcctgaatggtattgcctaggttttctcctagggtttttatggttttgggtctaacatgtaagtctttaatccaccttgaattaattttcatataaggtgtaaggaagggatccagtttcagttttctccatatggctagccagttttcccagcaccatttattaaatagggaatcctttccccattgcttgtttttgtcaggtttgtcaaagatcagatggttgtagatgtgtggtattctttctgaggactctgttctgttccattggtctatatctctgttttggtacaagtgccatgctgttttagttgctgtagccttgtagtatagtttgaagtcaggtagcatgatgcttccagttttgttcttttggcttaggattgacttggcaatgtgggctcttttttggttccatatgaactttaaagtagttttttccaattctgtgaagaaagtcattggtagcttgatggggatggcattgaatctataaattaccttgggcagtatggccattttcatgatattgattcttcctacccatgagcatggaatgttcttccattatttgtatcctcttctatttcattgagcagtggtttgtagttctccttgaagaggtccttcacgtcccttgtaagttggattcctaggtattttattctctttgaagcaattgtgaatggaagttcactcatgatttggctctctgttattggtgtataagaatgcttgtgatttttgcacattgattctgtacctgagactttgctgaagttgcttatcagcttaaggagattttgggctgagacaatgggattttcgaaatatacaatcatgtcatctgcaaacagggacaatttgacttcctcttttcctaattgaataccctttatttctttctcctgcctgattgccctgcccagaacttccaacactatgttgaataggagtggtgggagagggcgtccctgtcttgcgccagtttttaaagggaatgcttccagtttttgtccattcagtatgatattggccatggggttatcataaagagtgcttattattttgagatatgacccatcaatacctaatttattgagagtttttagcatgaagggctgttgaattttgtcaaaggccttttctgcatctattgagataatcatgtggtttttgtctttggttctgtttatatgctggattacgtttattgatttgtgtatgttgaaccagccttgcatcccagggatgaagcccagttgatcatggtggataagctttttgatgtgctgctggattcagtatgcaagtattttattgaggatttttgcatcagtgttcatcagggatattggtctaaaattctctttttttgttgtgtctttgccaggctttggtatcaggatgatgctggcctcataaaatgagttagggaggattccctctttttcttttgactggaatagtttcagaaggaatggtatcagctcctccttgtacctctggtagaaatcggctgtgaatctgtctagtcctggactttttttggttggtaagctattaattattgcctcaatttcagagcctgttattggtctattcagggattcaacttcttcctggtttactcttgggagactgtatgtgtccaggaatttattcatttcttctagattttctagtttatttgcatagaggtgtttatagtattctctgatggtagtttgtatttctgtgggatcggtggtgatatcccctttatcattttttattgcgtctatttgatccttctctcttttcttctttattagtcttgctagcgctctattaactttgttgatcttttcaaaaaaccagctcctggagtcattgattttttgaagggttttttgtgtctctgtctccttcagttctgctctgatcttagttatttcttgccttctgctagcttttgaatgtgtttgctcttgcttccctagttcttttaattgtgatgttagggtgtcaattttggatctttcctgctttctcttgtgggcatttagtgctataaatttccctctacacactgctttaaatgtgtcccagagatactgctatgttgtgtctttgttcttgttggtttcaaagaacatctttatttctgccttcatttcgttatgtacccagtagtcattcaggagcaggttgttcagtttccatgtagttgagcagttttgagcgagtttcttaatcctgagctctagtttgattgcactgtggtcttagagacagtttgttacaatttctgttcttttacatttgctgaggagagctttacttccaactatgtggtcaattttggaataagtgtgatgtggtgctgagaagaatgtatattctgttgatttggggtggagagttctgtagatgtctattaggtccgcttggtgcagagctgagttcagttcctggatatctttgttaactttctgtctcattgatctgtctaatgttgacagtggggtgttaaagtctctcattattattgtgtgggagtctaagtctctttgtaggtctctaaggacttgctttatgaatctgggtgctcttgtattgggtgcatatatatttaagatagttagctcttcttgttgaattgatccctttaccattatgtaatggccttctttgtctcttttgatctttgttggtttaaagtctgttttatccgagactaggattgcaactcctgccttttttttgttttccatttgcttggtagatcttcctccatccctgtattttgagcctatgtgtgtctgtgcatatgagatgggtctcctgaatatagcacactgatgagtcttgactctttatccaatttgccagtctgtgacttttaagtggagcatttagtccatttacatttaaggttaatattgttatgtgtgaatttgatcctgtcattatgatgttagctggttgttttgctcattagttgatgcagtttcttcctagcatcgatggtctttacaatttggcatgtttttgcagtggctggtacaagttgttcctttccatgttcagtgcttccttcaggcctcttttagggcaggcctggtggtgacaaaatctctcagcatttgcttgtctgtaaaggattttatttctccttcacttacgaagcttagtttggctggatatgaaattctgggttgaaaattctttctttaagaatgttgaatactggcccccactctcttctggcttgaagagtttctgctgagagatccactgttagtctgacgggtttccctttgtgggtaacccgacctttctctctggctacacttaacattttttccttcatttcaactttggtgaatctgacaattatgtgtcttggagttgctcttctcgaggagtatctttgtggcattctctgtatttcctgaatttgaatgttgacctgccttgctaggttggggaagttctctcctggataatatcctgcagagtgttttccaacttgattcaattctccccgtcactttcaggtacaccaatcagaatcttatcaatatcctcatctcccacatgaatattctctgacagttccagcccactctactctctcatcctttcctgaaatgttatggctcttatagcctgtgccacaaaattaggcatttaattttatattgtcttgttttgttttctaattatgtcatggatatattcttttccatgctagattgtgaattcttggcaaggaaccaattttcatgcttttctgtgtctcttttcagcatttagaaaatatggacatataattatactcaataaaaattgttaattgactgaacaactttcctaggttcattgtaactcttcagttctatgacattaaagtacagagcacaaaatggccaacaattcgtatgttaattatctgaaatgatgaaatcattcaatacacctgggcagctatgagaaatgtcgttgatggtgtgagcagtagtggtgcatgcaagggccatccatcctaaacagctctcatacactttgagttttggactgattcatcagttatctaccgagtagattgcttaaaaagaagtgttgggggctgggtgcagtggctagtgcttgtaatcccagcaatttgggaggccaaagcaggtggattgcctaaggtcaggagttcgagtccagtctggcaaacatggtgaaaccccatctctactaaaaacacaaaaaaattagctgggcgtgatggcatgagccagtcatccaagttacttgggaggctgagacaggggaatttcttgaaccagggaggtggaggttgcagtgacagtgagctgaaattgttgcactccaacctgggcaacagaatgagactctgtctcaaaaataaaataaaataaattaaataaataaaaattaaaattaaaaaaagtattgaggttttattgctccatttatttgtgttgtcatcaaccatttggtatccattgcctcgaagtaaatcaaggtgatctaaagggttaatttatgattcttggaaaattctataatgttcgcttatctcatttgaagaaaaagtaaaagttaaaatatttgaagaagttactactcagactataaaaatcatgtagtcttgccttctcattctattctcaaggttctggaagttaaataaaaatggcttattataatgctggtctttttactaactcataagaagttcaaaatatgtagtttttactcctctacctgctagtatttagataagcacctcaaaaccaatattcacgtttcataatcagagtgccctagttaaactccagatttgttacttactagctatgtgactctgagtaaatcatgtaatttctaagagccttcgttgtctttcagataaaataggcaaagccatatctacttctcagtgttcttgcaagaattaattagctcatataataaatgtgcttattactattcaaaaaacatataaaagcataaagagtacattactatttatctgggaataatcctttttattataatgtaataattgttattacaattattataaaactcatctttttgagtagggcatacattattgttcaaaatgtaataaaattggtgaagttttagaactggagcaagatgtcatagtagcgtaaaagagggcacttaacaagacctgggtgccagaaagtatatctaaattagaagatttttaatatgagttttagagattttaaggaagtcattatcagggcttctggagacaaggtggcttgggcacatttatattttagacatatctagcaggagggaacatggttgagcagagggtgatgatgacataaggacaccactgaaaggaatttgagtaaaatgatgacacatattaggagagatggggcagatattactcatttgagaaaaagccacacttcaagagtgactggaaagagtcagggagtgcgggaaaagagtcaaaggtgatccttaagtatctagtttgggtaactaggatagtgtggctccaacctgtcgtaatcagcttgggctgctataacaaacattatgctgagtggtgtaaacagtggaaatttatcttctcagaattctagaggctccaaagtctgagatcataaatgtcagcatggttggattctgttgagggccctcttcttgggttgcaggcagctgccttcttatatcctcatattctcagagagagagagagatcatctctcttgtgcctcttcttataagagcactaattccattcatgaggactctaccctcatgatctaactatctcccaaaggcccacctccaaatatactttggagattaggaacttaacatataaattttgggaagcacgacaattcaccccatagcatacccattgagaagaacaatacaagaaaatttggagttaactaatttgaggagaaaatgatgagtttacattaaatcaagacgaacttgagatgttttaagagggaactgcttcttccctactacttatatgttctgccaggaagagaaaattctgctagtgtggtacttctagtttcttctcttgtccctgtactcactctgcccctggggaggcgaattatttatttggttgttcaaactggggagagtgactcttctgtctagaaacagccttcctatggagagcctgggctgtcctctttcactccatgctttacatctgtaaattctgtaggagcctccctcttggaagccaaattgccccacaatccaggtcagattgtggttcatattagccactgcacttacccttgtttgaaagtcacgtgccccaacttggttatggcttggtctctatccttcctgcttatttttcagctttctcagtgttgaggcaggaatgaaaggtatcctttatagaaaggactctagagattccaacaaggccacttttgacaacacatctatgacccattttttggcatctcacacaattggctcatttaagtttttcaatgtttgagctaattaaaatataaatatgatgtatgttttatatacttccaaaatgtaataaatgctcagtaagtatctgtggagattatatatttaaaattagttgggaaacataactatcctactgttaaacattttttagagagatttagagatattcatttattgaactcctatttggctggtaatttgctcagtgtgacctgccatcctacactttttacaaactgccccacttctcattttgccaaaccagattgcctttctcttaatagctccttctttcttgccactgaacctaaactcatgttctgagcagtaggcaaaataattaacagacccacaaagatgttcttaagtcccagaccctgtgaatatgttatgttacatatcaagggggaattaaggctgtaaatggaattaaggttgctaatcagttgactggaatataaagagattattctggattatccaaatcagttcagtgtaaccataatggttcttataagtgaaaaagggaggcaggagagtcagagtcccagaaggatatgtgataccaggaagcagaggtcaaaatgatgcaactgctagatttgaacacggaagcacccacaagccaagtgatggggatggcctctagaagctgtgaaaggcaaggaaacagactctccttctagaaaagaatgcacattgatgacatctgattttagcttagtgaaacccatttcatatttctgaactgcaaaactgaaagatagtaaatttgtgctgttttaagccacgaggtttgtggcaatttgttgcagcagtaacaggaaacaaatacattctgcaactcatctcctgcattttccctgagtggccatttataaatacatagactctgacccagcctggccagagataaatcaggctcctccacctctccaactgctagctctgtgatcccaggcaagttattaaatttttacatgactatttcctcacctataatatggggattatcatgacaccatccttatagggatgagttaatagatgcaaagtcctttggaaaagtgggcacataacaaacactatagaagtgtacgctaatattttcattattatgcttacctctacaaattattttataaatcagttcaaacgccaattcttctatttccttttggaacaataagatctttcttccttaaatttatagagtactttaccttaacaatattttatagcatgtgttcgttattatgcttacctttacaaattattttataaatcagttcaaatgccaattcttctatttcctttttgaacaataaatttacagagtactttaccttaacaatgttttatagcatgtgatattttaattcttatttaatcactttcatacatattgaatcctctctcctaagatataagatcttgtaaaaattagtgatatgcattttatatatttactttatttattctaattttgttattcctatactgtctaggccagtgttttgcatatcataggtgttcaataaacatatttgaactaccaatggtgttttccacttgtgctaatttcaagaaacaaacaaaatcattcactattcaatgggcaacactctacagaaagaattaataaaacagaagaatgaataaaaacccgaagagtagcatgaagtctatagaaaatatcctccacaagtatgtagtgggattcagattctttttttcactttcactctagatgttcaactttaatttaaataacatgttagatcaagtgtgcttttataaattagttattagcccataaactgtcttatatagtctgctctgaaggttatcactttaagaggcatgatatactgtggggactgaattttagtactgtgcaaagacctgattggaatgaacatttctgaacttctagagcctctccagtaagaatgcagttgttgctgtgaaattgactttaaaagaagcttctgatgacaaggcctagctgattattgtttcagagatgaagtgaaaaaagagcaaacatagttaccatagaaataaatgtattaagttctaaaattaacattcttattagtgattatgcccatatttttttgatacatctacagttaatctcaaaactttcatcatgggtatggggttatacttcctggtatgacccaagatgtgaaactcaattaaggtcaaatgtcattaacttcggtagtatgttttaaaattaacctcaaaacggccccaaattttgttaaaactatagaagaagaaattatttattaagaaggtaagaaaagtaattcttctaaactatgcaatcatttatttattggctctgataagaataacatttcaaatggttgtgttttctgtcagtaatttgaagttctagtataatatttttatttaattacatgattacaaaacaagtctttacttacatcatatgcattatatgccaaattaattctcctttgaaaaggccaattgctgataagagcaatgaattctattgaatagctcactgaattctgagagagtaattaagaaatttttatatacacacagaaacacatgtggctcacacattaagatgtagacgacaatctttcaagataccatctaacaaatggaggaaatatgttttcagcttgcaaacttcaaagctctatgtccaataatgagataaatcttcatttctgatggtactaatccaacactgaaaaattaattctcctttgaaaaggctaattgctgatgatttcgcagaaaagaggtctattctttttagtggatatgaattgatcctgctaatgcagaacctgactttttcagattcctttagcctttagtatgagtgaatttttaaaatttctcttttgttgtgttagaaataaatataatgattttttctcatgctgatttttaagagtttaaaggaaaacaacagctgatagctcattaaggctcatgagacaccactaagcatatacaactcccattttgaggctgcataagccaaacactttcaattccactagaaggtgtcattagaagtacttaagcaaagaaagctactaggagcaagaacaccccagagaatttctgtaaagactttgatgcacccattgtcccatagtttaaaatgttgtatcactcaagcagcaacctcattaacagatcatttagattatcatgagttatgatgaactcaagcctctgtagtattttcttcccaacaatttgctttattacagcaatataacagacatctgccttaaagagaagtcttactttccactctattggatgccactgaaatttacagtgtctggggcaggaggaagaagtaataaagtcttacagggaaaaaaaaaacttgttacctaagggcaatatcagaaatgatgagaaatgagataagccagtaggactaattcaactagaactgaagaagctggctctgaatctgatttgctctcctccaaaagaaaaatatgctcatgataacaataactaatgtgtacttaatacttttgaggaaaatgactatgtggtgctccaaactatgtgcaacattctgtgccaggttattctatctatctatctatctatctatctatctatctatctatctatctaaaatttatgtatacacagaaatataacattttacataagtagtaaagtaactctgtattttaggtcttatcattgccatgttaaatatatttccagagtaatatagtcagtaagttgtttaagtggggtttggatgcaggtctctttggtttcaaaggctgcagtctttacccctcatcatattgccttgcttttgttgccttcttcacttcttttgtctctgtttcttattcagacaaaggtgggaattgactgtaggtgaagactcttctttggctaattggtttattttatccctaaggaagattcctattcttgcttctggtctctcttctccctctctctcttcctctctcttttttttctctccctctttccttccccctcctcagaaaatgactagactttacctttgcaatagactaaatcatagcccctaaaagagatatgcctaggtactaatccctgggagcttatccataaaaaatgtatttgcacacctgatgaaattaaggatcttcaaaggaggttcttgcattggattatccaagtggaccctaggtgaagtcacatgtatccctttaaaagggagggagatctctgtctccctctgggcttctcagtctagagggaggcagatacacacaagagaagaggcaatgagatcactgagtcagagattggagttaggcatccataaaccaaggcattcctggaattaccagaagctggaaggcaaggaatggattgtctcctaaagccattaaaaggaatgtgaccctattggcacctttaattctggcttctggccttcctaactgaagagataataaatatctattgtgttaagccaacaagtttgtggtagtttcttacaatagtcacaggaaactagcacaactctcttctttgaaattctggaattggcggcaggggaaattgcatgtaaaagcactgcatgtttacctctggctctgtgaaatcacaggaagtacagttaaattctaggaaacacaggggcatttttacctctgcacaaatctataaagctcctgagggtcctgcagtctttttccaccctgatgtctcccaagacagccttctgattgctgagatatagcctacattgaatagatatttgttgagcaaatcaacctgcttctgctgtggctccagcaggactggaacatttcaggaaagaataaaaggtcatttctcctgagttaagtgttaattcttgctttgaatgtcagtggcgtgctaacacctgctctcacatgtattttaggtccatcagcgtatcctaactagaaggccttgtgactagcagaaaagaaaatgtaggtgagccatgcaatgatggacgtggactgctctcagggcgcagtgacaattatgacttagtcatcaaaggtgaattgatacaaacacttgaacatatcttaaattagattgttccaggaatccttaaaatgcaagagaaatggcaatgatggggcagtggataaatctaaatgacattacgtgggctatgattcctttctccatgccatttggaaagttagaagaaatcatattaggcctgagaatagactgggtgcttctcagtgtgtatcctttacacccagagtgccaatcatctaggatgcaccggttctgccatactggggatatacagtcaaagtccattcttactagctggtaccttgcaggaccagttgtcaaatatttttaacagcaccttattcatgcatttttttctagaatatatatgaactttttccatccccagtattgtggctcccctcccatccctatttagatcctcatctctcacttggatgcctaaaatagccacttcagcccctctttctacataatcatctcctgtaatttattctcaacacatgttttcttgaagccttatccaaatatatgattcctctactaaatgcatgaatacataaagaaaacaaacatagaataatttactgctactgacttcatgtcattccacaggattaaatatagatcccatattatacacactcatattacacttatataatatctatattattatatatctacattaaatacacatatattctatacattaaaagaccctcacaatttgaaccacattgtatggactcaatgtttgtgccccacccccaaattaatatgctgaagcctaaaccccaatatgatggtatgtggaggtgggatctttgggaggtaattaggtcacaacggaggagctcttatgaatagaattaaagctcttataaaaagagacacaagagagattctctctctctctgccagttggccatatgaggatacatgcagctatcggcaaaccagaaaggccctcattgaaaacccaatcatattggcaccccgatctcacacttccaggcaccaaacctgtgagaaataaatgttggttgttgaagtcattcagtctatatagtattctgttattgcagcctgagctgactaagacacccatctaactctgcagccttctgttcctctctctatactgaagtctatttcattatttcatatgtatttctcatggctttttgaaatcaccagacaatttcctgcctccatggttttagagctgatgtcaaatgggaacaccctggtgacaccaagccaacagatgtcaattctggttggtcaaggctgctgctctatctgattagttggtttgggttaccctaaaggcagatcctgagacaaggaatttcatataaatagtttactaaagacataatctcaggaaggaggagtgagaaaagcatagagactgatacaaggatggaggaaagccaatataaatgtattttgacaaagttactgtgagaaatcagaagttcacacgtatgctaggacatgtgagaagcccacctatgaaatgaccttataatcatccagaaagataaggcatctatccttccatcattggttaggtttgttaactccactgcatttccaggttatactgatgaacaagatgagggaattccaaccacatcactccaggccaggaggctgaatcagaaagataagtaatcgtccatttcctctgctccctcactgtggactggaacgtggatatggtggtggggagccaggttccgtcatgtagatatagtggagcaaaaaagctctaaaaatctggatccctgcatgacctcatggaacagagtagttgtatttttttcatcctaccacccctggagtgcctaacgattctatattgtcaagtgaaaattatttcagtctcattctggtggctaaacccaaatcttaattaatattattctctcatgcatctgtcccatgctgtttactttcactgcactctagttccacttcctgtcagactctattgcaattatctatttaaatgcccatctccatcgttgcattgaaagttcttgatgacagccacggtgccatttctgaaccctgagtgcctggtaggtattggatttacaagaatttttaaataaaatttaaaatgtaattgctccaacagtaaagctgtaatacatgcaattaaaaatatatgatacataatcaccactcactgggctgcttactgtactttttctcatgaagtataatttgacacaggaaggttaatgaagcatttcctgggaaacatactttacatataacatgactccaagatgtgtttgtaccattcttgtattctttccctctgtcacaattagagaggtggttcttctcctagccaagaaaaattcttctatctatgctatagatcttcttttttctcctaccattaagaccctaagctcttttttcgattccttcaagttctttctctctgttggttaaaatctctctaaaacaatcaaagaatgctacctagtcttcacatgttcctttaagtggcagactcttttctttccctctttccctccctccgtccctcccttctttctccctctctttccctctttccctttccttctttctttctttctccctccctcccttccttttccttcctctctctctctctttctttcttttttttttttttgagtcttgctctgtcacccaggctgaagtgcagtggcacgatctcggctcactgcaacctccacctccctgattcaagtgattctcctgctttggcctcccgagtagctggcattacaggcatgcaccaccactgctgggtaatgtgtgtgtgtgtgtgtgtgtgtgtgtgtgtgtgtgtgtgtgtgttttgagacagagtcttgctctgccacccaggctggagttcagtggcatgatctcagctcactgcaacctccacctcttcagttcaagtgattctcctgcctcagcctcccaagtagctggaactacagccatgtgccaccacacctggctaattttttgcatttttagtacagatggggtttcaccgtgttagccaggatagtctcaatcttcctgacctcatgatctgcccacctcagactcacaaagtgctgggattataatttttgtgtttttagtagacatggggtttcatcatgttggcccagttggtctggaactcctgacctcaggtgacccacctgcctcggcctcccaaagtgatgggattacaggcgtgagccactgcacctggccaggtgacagactcttaattatcctgtgggagtcaaggtttcataaaagccttcacttgctgtctgcattttctcactcacttcacaacacaattccaacacaaccaggtttatatcgctcttgccaacatttcacaaaattcaatggacttctgttatcatacatatctgtcagcagcactcaacaccactcaatcctcccttcaaatgtccactgtgtcttcatttctgtttattcttcttttctctccagccactcattctgaatgtattttgctgcctcttattccctcagtagacatttaatgataaaaattctcaacatttatttcaagatacgcttcccttctcactcaatataatgtcgctacttatttttttccaattctatggcttcattggtcatgccacaaatcctaaatgttcatcgcctggacagaccttgcttctgagttccaaaaatgtctattcaaatgtgtactgagatgtctcactggcaactcaaaaccatatgccattgtatctgaaatgttggcccccttcaagactctcaaccaagaaattgcaccataatttacctcattgttgaagccaagaaaatggaaatcttatatgatttctcattctgccaccaagaatggccaaccacactgaattgcctggaactgaggcgtcttgtgggaggtagaacttttaaagctaaaattaagttagttggttaccttccaatctggctcctggctctgtgcattctatttcctaaatatctcttatatttgttcaattatttccattttcatgacctctgctactgtctcttgtacagggatccgtacgttcattcttgcccttcatttctcaccctacaaatgctttctgtacacaatgaccacaagatatcaacaaaaagcaaaacttatgatatcaatctcttccatccttctcattgtctatgagataagacccagcaatatctgggccctgcgtgtctcctcagactcatgattcattatttcctctgtgttccagcccaactaacctttccatttcttaaatgtgccatgaaacaggcctggaattactcttccctactccttcttcctattaactcctcatcttttgggtctcagaatcaatgtaatttcctaaagatgttttgccttctctccctagacaagatcagacacatctttttccccccgcccatatcaaactgcactgttccttcacagaattcaacagcattcattatttgttcaatatccatcttcccagccacactagaaactccatgaagcaactattattgctttattctcttaccactgtatatacaataccccaatcagtgcctagaagcaaaaaacttttgtgaaatgaataaatattttgttatagaatatttccttatgtgatatcatgtcctattataacttcagataggttaactaaaaatataactctattaaggaaagaaataaggccatggcccctcctaaaattttagcaagttttaccatatcccctttgtatggtttggatttgtgtccctgcccaaatcttggattgtattctccaatgttggagtaggggcctggtgggaggtaattagatcatgggggtggacttcccccttgctgttctcatgatagtgagtgagttctcacaagatctggttctttaaaagtgtttagcacctccctctttgctctcttcctccttctctggccgtgtaagatgtgtctgcttctcttgcaccttccaccacgattgtaaatttcctgaggcctccacagccaggcttcctgcacagcttgtaaaactgtgagtcaattaaaactcttttatttataaattatccagtctcaggttgttctttacagcaatgtgagaatgaactaatacagcactgaatctaagatgtcatcaatggtaacgtgtcattattttaagtataactaagaaagaaaaacaatgttgaaaaataagtcatgaaacaccttgactgaaagacacatccagttttcagatatcaaaaagtaaaaaactgggaaaggccacaacttccacaacaaatcttgtttgctcacttctctctctactgggtggtccctccttggtccatggagtatcacctcattcttgggccattgcaacttccttgtattctcctaactagtatcttctcttgtatacttgaacccccagcttctttacatttcaaccagactgatcatttcacaatacaaacctgatcaccccaaaatgcaaagcctgatctctggataaccctatactggttgtctattctatgacacatcacacacatactctcccttgttttctgtcttcctgacatggttcctaaaatatgccagcttctttcctttatctggaatattctgcgacttgctgtcttcaatcgttccttctgctccttttcattttatagtgttcattacaaatttccccttcccagaacgatgttctgtgattctgtcactgcaaatcagtagcccctctcccctgcccatgccgttagaatttttcacacgtatagcctgttctcttccctcaccgagctcatctcaagttctcattacacatatttttttgtgtgtttatttgcataacgactgttgcttccactgaactttgagctccataagggtaactatcagcatgatgtgccagtgccatataccacagtgtgacacagatagattatttattgaatgaatgaggaagtggaacagttacactttgctgaaacaaagacaatagaaaattcaatgcacagccctgagaggaatctagaaacaagtctgcagctaaaaagaagcagcatatacccccaaaacttaggtaggtgtcataaccacatcctcataaccatgtgtgttctcaccagatacacctgccttctaaagactgtttaaaaacaattcacactaaaggtactacttaagaaaaataggcccttccatcttaaaagagaaaagtttttatgtattgcattgtatgttcctctcaaatattttaaaattattttaagtcacagattgtttcataaacataattttgtttttccaataaaaagctttgaaaaaactcagaaaatatttttgcaaatgtggacctcaatatcatttgttatgtctcattttgaaaaataatcaaatttgaaataaaatgtgttttagaaggttagaaatatacacatattttctcttcacacgtttgtgaaaaaaattaggtaaatgactaatgagaaaatactactagactaaatttacaaagaatacagagcaaaaacagaacaatcttaatagaatcagtgccaattacatctcacatttcaatggcagtgaaaataaatgtgattttgacatatgaaattgtgttaggaatgtttttatgtagaggaaaatgttatcatccttgggggctttttgttcaaccaattttcaactttctaatgcctggctgtgccttgtgtggaatcagggaagtcactatttctctgtccttgaatactgctcatgcatcattctcataaaaatatatatttgcccatccctgaattcatgtgtctcttcattcactcagcatttatggagaaaattttatatgacaagcacttggctagcttctgtatatacaaagatgaataattctaggattaaaatatggcaggaaaaataaaaccattaacaagtaaattctgaaagttaaatgctaataaaaaagcagtagacatatgtacaaatattgaatgccattttatatctctcttcattttccagagaagggcattaaggcttaagataacaaggtaatttcatggagatttcatacctaacgaatgaaaagactagggcttgaattctggtttctcatttcataactagtaaatccctttaccgagtgttgtcaaacatatgtcatccattttatgtatgaaatctcctttcatactatgcatcttcaccagtttgagctgctataacaaaataccatagactgggtaccttataaacaacagaaatttatttctcacagctctggaggctggaagtccaaaatctgtgccagcatggtcaggttccagtgagagccctatttcatgtcacagactgctgacttctcattatatcctcacatgaggaaagagcaagagaactctgtggagttccttttataaagacaccaatccattcatgagcactccaccctcaagacctgattacctcctacagaccccacctcctagtattatcacattgaaggtttgatttcaacatacgcattttgaggggaaaccaacattcagtccataagaccatgaaaaataacaatttttatttctgttatactgacaaggaaaccaagactcagataggctcagcaactggccaagccacacagttagtaaatggcagcaccaaaattcaaactcaagtttgtccaacccagaaacttctgcaatgtctactatcacgagcttcctctctattccagttcccatgtatctgtgaaatgatttaattatcacacattactagcatttgttgagcatttatatgtcccaagcattccttaaagatgcttccaagaatcaagttatttaattccaaaaaaaataatatgtaggtactgaggtaccatcctaaggtattgaggtattatcctgatagcacaccgagaatgctatcgggtctcccaaagatggagaattaaagaacgaatgtctctatattcctcagcaggagtcagtctaaaaggaataatccaccagccagagtatatgccatttttagattacagatacaatccactataagttccaaacccagagtggtcaatattgcttttcttcttttatatctgttctgttttgcaaaatatatgttatggttaaagaatgaacttgagtgagctgccctgaaatgagagccatttgtttaaagttctgtggtgactccttcttccttcccacctgcatccccaaccacatgttgagattcctggaaatatgctccttcataagggtagagagccaatgaggaccaaatgatatgttttcctttccctcagcttcaagggctcaaagtcccagatgaggggcagggagcatactccatgacagaaataaacaaacagccaggtggcccaagtaatgactagccaggtctctggaaactcctcaagaactcaccggcttgcagcctaatctgggaacagtgttgtacatgactacatataatataatgtgaatagtactactacagacaggtggaccaacatgatctgaaagcaccagttaagaacacatacagaagtatttgatacaaggtaaaatctatcattcaaaggcatacaagtactttgcaactacgaaacacctctaaaaaactaacggctttgagacagtgctatacataaagataaataatttaaaagactatatgtacattctcaaaagtttgtccttgcacaaatcacttgcttcccaccataaacacttctgagacccttcctaataaaaccattaaggttgagcaggcaacattgtttagaagaacaactgtgagttgtacatgacccttcataaaagcagagactactaaacatcattagtaggcgatattacagcatcttcaaacccagacataactggcaccaaatttgcaggaaaatgagttaccttcctaatagcccttaattacaattacaatgtgactttactcgtattccagtaatgaaagcatttactctcattcctcatctgatttaaagggcaacataagctgaatgcaagataccttataaaattagaaaagcaattgaacaaactttaacactgtgccccaggatgacaagaaggaaacttcttcagaaacaagacatcagtgtatccaaaaagttctttggatttcacagtttgtaatcccagggaaagaaatatggaaaaaaaaattgagaactcagttatttggccaagctaaatcaaacacatgtttataaatctaatttctatttcttagagataccgagttacagatactatatgggctaatgataacgaagatgacaaaacttctttttagtaaaaaataaccattagctataaaaattagaaaatagagaccagtgaaatataaattgagaatagggtataatggatattacaacaattaaaagaaaaaaagctggccaggcacgttggctgacgcctgtaatcctagcactttgggaggccacggcgggaggatcacaaggtgaggagatcgagaccatcctgactaacacggttaaaccccatctctactaaaaatacaaaaaattagccaggcgtggtggcgggcgcctgtagtcccagctactcaggaggctgaggcaggagaatggggtgaacccgggaggcagagcttgcagtgagccaagatcacgccactgtactccagcctgggcgacagagcaagactccgtctcaaaaaaaaaagaaaaaagcttattaaataatttaatttagtgctataccttataaaacattgtaaaagaaattccaaatcaaaatgttatttaaaaacaataaataacccctctagttcaaaacagaactaaatatttatgaactttttagaggaatagtgcttttctgcatcaaagaagtgacaacaaaggtagtggcagattcaacacagaaaaattacaacttcctcatacaatgaaaattttacctaaagcaaagaagggattaacatctaatatgacaaaatgttaagatctgaattgtacacaaagtgcacagaaattgataaggagaagctctggtgacggctagaagattgccagagatgtgaaccatgtgtgggaaagctcgactgggaggataatataaaacaagaggaaagaaaagtcagatttagagtgagaacattgtcaataagaattgccagggtcccctagatggttccaatgagcctcgtctcctgataatcacatccttgtgggagggggtctcacattgacttgtgtaaccaatatgttactgcagaaatgaagttatatgacttctgaggctaggttaggaaagattttgcaacttctgccgtgtcttttcttgtatcacttgctctggggaaaggcagctgccacattgtgaggaaactcaagcagccctatggagaggtcaatataaaaataactgaaacattctgagaactgaagcctacatctacttgattattgtacaaaggaagaaattgaggcacagagattaagagccttgcccaagtttacacaggaaggaagtgccagatctaagatcaggtttccagagcctgagtccttaacctttacatgatactgccttctccatggtagaaatagaatgaaaaaatgtttacaattgtatgaaacataacaacaaaaaagaaatgctaaaattcagaaactgattggatgtgaaggcaaggggtgcattgaaatggctttagtttttcaaatatggataacaaggagaacagtagggttattaattaagataaagatcagacactcacagtttgaaaagtaaaatgtgcacataaatgtatgcatgtgtgatcattcatgttgtttagagagtaaagtgatacacagggaatgtagtgagcaagctggtttgggattatcagatttgagcttgcccaggcaagaagaatttcagagaagcttcattccactagcatatattaaaagatggcctctttcaaatgataatgtgtatactactttccttctggagattcataaaacgttggaaatttcctcactccacttaacctcttttttgcccgtctcattcttatcagtcactctaggcatggatctaatctaaattatttttaaaatatgactctttaaaaacacatactaattaagtagaattcaataaaattagtttatttaaaacatgaatgaaataaaaataattagactcgttttgcaataactagaatataaactactatgcagagtgcaaatgctatgtttcattagtgtgtaagagaatattctaagtttgagaagtgttttatttctctaaaattagaaaaattttagtttttctttagtttttcttctcccaaacatatgtgactttatttcattttaatatataagtctttttaataaatacatttctgtctatggggagctcggaaaaggcaggtgcagcaggtgttatttttgaagagttctgtacacgttcacatctgcttagttgttatgcactgctgcatgtaatggccaagaaaatccaacacaaatgctgaaaccaaaatccccaggaaaccagcagaaacgaaattggacaaatcctaatacataatgtatatacttcaatatcctattgcatgtggttacaaatttgaatatggcatatagcttatctttgtattttactaaaataaaactaaaacccacaaactatctggggagattaaatttaccgtacataaaaatgcccaagggaatgctgcattccttttatgatagagggactaggcaatgaccagagcggtgcaattaaccagactgttggtcatgagttgatattattgttccactagccccacttgattcactgccaagctcatcccataccctcatttgttagagccactccatctttgctctatttcacttgcatagaaaaaaaattcagatcctgaaaatcaatatgttgttgaattctaattttgtcttattttacttgcagatcttatctcacttgcagctgtttacattttccatattgtgttaatagtcaaattttatttctaaacataacctaatttttgctgtgcaggtaacaggctgtttaacaagctatacctactttagggtccttcagtttttttattctgtttgactatgtaatgtcttcatcaaatatctcctcatttgaacatcaaaaatattattttttattatagcaaccaccaagtatcatgatacaaagcactaaagttggttcttcgagaattattttgaaaatagctcttttaaatgtagaaaataaatttccttgtgtttcttattttatatactaaatatattcatttacaatatatatttggttttcacttcatatgttcttgcctcctttgaataattttaatttaaagagaagacacaatttccaaatgtttaataaagcctcttagaattatacttcatgcaatagataaatagctatgatacctgatcagaaaatctcatgagcagtaatgactgaggagggctcctgaaggatgctatgtctccgtatccttccacttccccaaatatacaattaatttaaagctggacagacaatgggacaaagtttcagccattaaactccaaatccctcaaaatttaaaaacaaaaaaatttatcaacaaaacaaatagcacattttaaaatttaaaactaacttaatatatgactatacaacccaccaattccatttctagctatcttccccaaagaaatgaaaacatacattcacaccaagacatgtacagagatgttcatagcaactttattcacaatagccaaaaagtggaaacaggccaaatgtccatcagtgagtgaatggataaacaaaatgtgtcatagccatacaacagaacattactcggcagttataaaaaaggacaaagatacatactataacattagtgaaactcaatcatgttatgcttggtgaaagaagccagacacaaaagaccacatacaaagatatcattttttattttgtttcattttattgtgccttgcagataccacattttttttacaaactaaagatttttggcaaccctgcatggagcaagtctataggagtcaatgggagtcattctgaacagcatgtgctcatttaaagtctcagtgtcacattttggtaattattacaatatttacaactttttcactattattacatctgtcttggtgatctgcgatcagtgatctttgatgtggctaccatcattgtttggggcaccataaaccacactcagataacatgttgaacttaataataaatgtgtgtgtgtgttgactgctccacagaccagacattctccatctctctccctctcccccagcttccatattccctgagaaaaaacattattgaaattagaccaattaataatgctacaatggcctgtaaatgtttaagggcaaggaagaaccacccgtcttttagtttaaatcaaatgctagaaatggttaagtttagtaaggaatgcatactgaaagccaagataggccaaaagctaggactcttgggccaaacaggtagccaagttgtgaatgcaaaggaagagttcttgaagaaaattaaaagtgctactccagcaaatacaccaatgataagaaactgaaacaatcttattgctgatataaaggaagttttagggctctgggtaaaagttcaaactagccacgatattcccttaagccaaagtcaaatccagaataaagtgactttcttcacttctatgaaggctaagagaaacaaggaagctacagaagaaaagtttgaagctaacagtggttgattaaggaaagaagttgtctccataatataagaagcagcaaatgctgatgtagaagttgtagcaagttacccagaagatctagctaagaaaattgatggagggggctgcattaaataatagattttcaaggtagaccaaatggtcttttattggaagaaaatgttatctaggactttcatagctgtggagaagtcaatgtctggcttcaaagtttcaaagtacaggttgactcctttgttaggggctaatacagctggtgactttaaattgaagccgatactcatttaccatttgagaaatcctagtgtccctaagaattatgctaaacttactgtgtttgtcctgtttcccataggtgcaacaacaaagcctgaataacagtacatctgtttacaatgtgacttactgaatatgttaagcctgctgttgggaactactgttcagaaaaaaaaagattcttttcaaaatattactgcttatggacaatacacctggtcattcaagagctctgatgaaaacatataaggagattaatgttgttttcacacctgctaacacagcatccattctgtagctcatggatcaatgaataattttgattttctcatgtaattatttaatacaaggacagacacttctcaaaagaagacatttatgtggccaacaaacatatgaaaaaaagctcaacatcactgatcattagagaaatgcaaatcaaaaccacaatgagataccatttaacatcagtcagaatggcaattattaaaaagtcaaaaaccaacagacactgacgaggctgcagagaaaaaggaacgcttttgcactattggtgggagtgtaaattacttcagccattgtggaagacagtgtggtaaatcctcaaagatctagacgcagaaatatcatttgactcagcaatcccatcactgggtatatgcccaaagaaatataaatcattctattataaaaatacatgcacacacatgttaattgcagcactattcacaatagcaaagacatgaaatcaacccaaatgtccatcaatgatagactgaataaagaaaatgtggtacatataaaccatggaatactatgcagccataaaaatgaataagatcatgccctttgcacggatggagctggaagatgttatcctcagcaaactaatgcaggaacagaaaaccaaacaccgcatgttctcacttttatgtgggagctgaatgatgagaacacatggacacatcggggggaacaacacacactggggcttgtcaaggaggtgggggaagggagaacatcaggaaaaatagctaatggatgctgagcttaatacctaggtgatgggttgatctgtgcagcaaaccaacatggcacacgtttacctatgtaacaaacccacatatcccgcacatataccatggaacttaaaaaagttgaggggaacaaaagaaaaaagaaagaaataaatttcttaatgttatagctgccatgaaaagtgagtcctctgatggatctgggaaaagtaaactgaaaatcttctggaaaggattcaccattctagatccaattaagaatgttcataattcatgggagaaggtcaaaataacactaattggagtttggaagatgttgattccaacccttgtgaatgactttgaagggttcaatagtttagtggaggaaggaactgcaaatgtggtagaaataacaagagaactagaattagaagtcgagcctgaatatgtgactgaatatgttactgagtttgatcaatctcatgatcaaactacaatggatgagaagtttcttcttctggatgagcaagaaaattgccttcttgagatggaatctacctctggtgaagatgcagcaaacattgttgaagtgactacaaaggattttgaatattacacaaacttcgataaagcagaagaagggttttgagagtcgactccaattttaaaagttctattgcaagtaaaatgttatcagacagcattgcatgcaacggaaaaatcttttgggaaagagtcagtggggaaacaaatttcactgtggttttaagaaattgccacagccttggctgggcacggtggctcacacctataatcccagcactttgggaggccaagccgggcagattacttgaggtcaggagttcaagaccagcctggctaacatggtgaaactctgtctctatcaaaaaatacaaaaaattagcagggcgtgctggtatgtacctgtagacccagttacttgggagactgaggtgggagaatcacttgaacctgggaggcagaggttgcagtgagccgagattgcactactgcatttcagcctgggtgacagagtgagatgctgtctcaaaaaaataaataaataaaaataaattgccacagccacacaaccttcagcaaccatccctgatcagccagcagccatccacactgagatcaggccctccattagcaaaaagattatgacttgctgaaggctcagatgatcatcagcatttttttggcaatcaagtattttaaaaattaaggtgtgtacattgtttttttagacataatactattgcatatttaataggcaacaatatagtttaaacacaacttttaaatgcattgggaaaccaaaaacttcttgtgactatatttattgcagtcatcaggagctgaacctgcaatatgttcagttcaataggtatgttgttttgtatgattgtttgtgtgtgtatgtgaagaatctgtgtatttattgatttatcacctaaaaccttcttaaaattttatctattgagggggtacaagatttcttacatgcacatattgcgtagtggtgaagcctgggcttttagtaaacccattacctagacagtgaacattgtgcctaataagtaatttttcaaccctcatgcccctgccatcctcccacctactgaagtttccagtgtgtattattgcgctgtatatgtccatctgtacgcattgttcagctcccacttataagtgagaatatgtggtatttgacttgctgggttatttcacttaggataatggcctccaggtctctccatgttgcttgcaaaatacatgattccattcttttttatgcatgagtagtatttcatgttgcatataaattttatatatatatcatttctttatatataacaaaaatgtatataaatgcataaatatgtttgtgtgggtgtatacacacatacacacacaccacattttcttccattgatggacacttaggttgattccaaatctttgtgactgtgaatagtgctgcaataaacataagagtgcaagtatatattcttttatttatataaaatatccaaagaagggcagatatgtagagacagaaagcagatgagtggttgcatagtggtggagagtgtcaatgggagtgactatatgcacatgagatttcttttgaagctgatgaaaatgttctattattagtgtgcggtaagagctagataaattatacacttaaaacacgtgagctttatggtatataaattttattgcagtaaagctattaaaaacaaatggcatacactatcataaagctaatattactatgtttattgaaaacctattatctatagacaacacatgactcagattacagagggaacaggtcttaaacatagaaactatgatttaagtgtatgctgatctctaaatgactgacattagctcctttttttgagatgtttcatgggagaaaatgtatagaaagctaagagaggtggaaagatggagacacaaaagaagaggacagggtcaggaggcccaagtgtacctaaatcacaagaatgagcctggtgattcaccctgcaatcctttgcctttagagaccctcttggataggaattaggaagcatctccagaagggaaggtgacaaagacaatgtaatacgatgtaggttttttagtgattctctttcaactattgtgtctagtatttggaaaacattagaaaaaagttttagctatacatcattattttatatgttgtatttgctgatacagagattcaaatcagttgggtgactggtgatcagtagatgctcaataaatatttgtccaatagaagaatgaaagaacaattatgctatccataaattacaatattaaatatccatgagctatataattcaagggcaatggggcattggctgtgagagaaaattgtggaagaaaagcagatttgggatagggttagaagataatgaggccagccttggacataatgaacttaagcagagctcgtcccattgacatagaaccatctggaatgcatctcaatatatggttctggattgaggatataaattaggaagttttcagcatagctgaagtcatggaagtctgtgacatataaatcaataatgaatcaatttattttaattgatatacaaaatatttccatgtaattaattctgtctataattctgtattttttggctctgatggtaaatctgaataagtctattaaaatcttcagacattatacattttctttgagaacaacagtggctgtaaacaaagctgcctttgttggcttataaagaacatttgctgttcccacaaattacttttaatgatgcaaaagtccctctgtgacagagacttgttctgtggttatgcatttccctttctaatttcactttgtttcctttctggggtatactccttttgagacacccagagtctgaaaaatgtgagtcaaaccacagattggctggtaggaaaaaaagaaaatagttcatttcccctcttattaaatgtttattcttgttatatataaactcacttgctcttgctatgtggcattacaatattagttttactggtagggcttttaaaatactatcaatcaaatggggtgatagatatattatggggaacagaaccctgatttggagttaaaagaacttttatttaaataacagcttttccatttaccaactttgtgatcttgggtaaactgtaaggtttctctgagattcagtttcttgatccatcaaagttaagtaaatttatgtttctagtaggtttttcatgataattacatgacattatatatataacatatataatatataatataaaatatatataatatataatatacatataatatatataatatataagatatatatattttatatatatatctccaatatctaaatagactggttgctgactttatcattagttgatggttgacagaattatatacatttattttaattatatcattatttttcatatctaataaaaacttaaatcagtggagactttattcaaatatacttcccataaaattcaatgtagcgaagtttttggagcattttttactttattttattttattattattatactttaagttttagggtacatgtgcacaatgtgcaggttagttacatacgtatacatgtgccatgctagtgtgctgcaccaattaactcttcatttagcattaggtatatctcctaatgctatccctcccccctccccccaccacacaacaggccccagagtgtgatgttccccttcctgtgtccatgtgttctcattgttcaattcccacctatgagtgagaacatgcggtgtttggttttttgtccttgcgatagtttactgagaatgatgacttccaatttcatccatgtccctacgaaggacatgaactcatcattttttatggctgcatagtattccatggtgtacatgggccacattttcttaatccagtctatcattgttggacatttgggttggttccaagtctttgctattgtgaatagtgcctcaataaacatacatgtccttgtctctttatagcagcatgatttatagtcccttgggtatatgcccagtaatgggatggctgggtcaaatggtatttctagttctagatccctaaggaatcgccacactgtcttccacaatggttgaaatggttgaactagtttacagtcccaccaacagtataaaagtgttcctatttctccacatcctctccagcacctgttttttcctgacattttaatgatcgccattctaactggtgtgagatggtatctcattgtggttttgatttgcatttctctcatggccagtgatgatgaacattttttcatgtgtctgttggctgcacaaatgtcttcttttgagaagtgtctgttcatatccttcatccactttttgatggggttgtttgtttttttcttgtaaatttgtttaagttctttgtagattctggatattagccctttgtcagatgagtagattgcaaaaattttctcccattctataggttgcctgttcactctgatggtagtttcttttgctgtgcagaagctctttagtttaattagatcccatttgtcaattttggcttttgttgccattacttttggtgttttaaacatgaagtccttgcccatgtgtatgtcctgaatattattgcctatgttttcttctagggtttttatggttttagctctaacatataagtctttaatccacctttaattaatttttgtataaggtgtaaggaagggatccagtttcagctttctccatatggctagccagttttcccagcaccatttattaaatagggaatcctttccccattgcttgtttttgtcaggtttgtcaaagatcagatggttgtagatgtgtggtattctttctgaggactctgttctgttccattggtctatatctctgttttggtacaagtaccatgctgttttagttgctgtagccttgtagtatagtctgaagtcaggtagcgtgatgcttccagctttgttcttttggcttaggattgacttggcaatgtggtctcttttttggttccatatgaaccttaaagtagtttttttccaattctgtgaagaaagtcattggtagcttgatggggatggcattgaatctataaattaccttgggcagtatggccattttcatgatattgattcttcctacccatgagcatggaatgttcttccatttctttgtatccttttttatttcattgagcagtggtttgcagttctccttgaagaggtccttcacgtcccttgtaagttggattcctaggtattttattctctttgaagcaattgtgaatgggaattcactcaggatttggctctctgtttgtctgttattggtgtataagaatgcttgtgatttttgcacatcaattttgtatcctgagatttgctgaagttgcttatcagctgaaggagattttgggctgagacaatggggttttctagatatacaatcatgtcatctgcaaacagggacaacttgacttcctcttttcctaattgaataccatttatttccttctcctgcctaattgccctggccagaacttccaacactatgttgaataggagtggtgggagagggtatccctgtcttgtgccagttttcaaatggaaggcttccagtttttgcccattcagtatgatattggctgtgggtttgtcatagatagctcttattattttgagatacgtcccatcaatacctaatttattgagagtttttagcatgaagggttgttgaattttgtccaaggccttttctgcatctattgagataatcatgtagtttttgtctttggttctgtttatatgctggattacatttattgatttgcatatattgaaccagccttgcatcccagggatgaagcccacttgatcatggtggataagctttttgatgtgctgctggattcggtttgccagtattttactgaggatttttgcatcaatgttcatcaaggatattggtctaaaattctcttttttggttgtgtctctgcctggctttggtatcaggatgacgctggcctcataaaatgagttagggaggattccctctttttctattgattggaatagtttcagaaggaatggtaccagttcctccttgtgcctctggtagaattcggctgtgaatccatctggtcctggactctttggttggtaagctattgattattgccacaatttcagagcctcttattgatctattcagagattcagcctcttcctcgtttagtcttgggaggagggtgtatgtgtcgaggaatttatccatttcttctagattttctagtttatttgcgtaaggatgtttgtagtattctctgatggtagtttgtatttctgtgggatcggtggtgatatcccctttatcattttttatcgcatctatttgattcttctctcttttattctttattagtcttgctagcagtctatcaattttgttgatcctttcacaaaaccagctcctggattcattaattttttgaagggttttttgtgtctctatttccttcaggtctgctctgattttagttatttcctgccttctgctagcgtttgaatgtgtttgctcttgcttttctagttcttttaattgtaacgttagggtgtcagttttggatctttcctgctttctcttgtgggcatttagtgctataaatttccctctacacactgctttgaatgtgtcccagagattctggtatgttgtgtcttttttctcgttggtgtcaaagaatatctttatttctgccttcatttcgttatgtacccagtagtcattcaggaacaggttgttcagtttccatgtagttgagcagttttgagtgagtttcttaatcctgagttctagtttgattgcactgtggtctgagagacagtttgttataatttctgttcttttacatttgctgaggagagctttacttccaagtatgtggtcaattttggaataggtgtggtgtggtgctgaaaaaaatgtatattctgttgatttggggtggagagttctgtagatgtctattaggtccgcttggtgcagagctgagttcaattcctgggtatcctttttaactttctgtctcattgatctgtctaatgttgacagtggggtgttaaagtctcccatttttattgtgtgggagtctaagtctctttgtaggtcactcaggacttgctttatgaatctgggtgctcctgtattgggtgcctctatatttaggatagttagctcttcttgttgaattgatccctttaccattatgtaatgaccttctttgtctcttttgatctttgctggtttaaagtctgttttatcagaaactaggattgcaacccctgccttttttttgttttccatttgctcggtagattttcctccatccttttattttgagcctatgtgtgtctctgcacatgagatgggtttcctgaatacagcacactgatgggtcttgactctttatccaatttgccagtctatgtcttttaattggagcatttagtccatttacatttaaagttaatattgttatgtatgaatttgatcctgtcattaagatgttagctggttattttgctcattagttgatgcagtttcttcctagcctcgacggtctttacaatttggcatgatgttgcagtggctggtaccagttgatcctttccatgtttagtgcttccttcaggagctcttttagggcaggcctggtggtgacaaaatctctcagcatttgcttgtctgtaaagtattttatttctccttcacttatgaagcttagtttggctggatatgaaattctgggttaaaaattctctcctttaaaaatgttgaatattgccccccactctcttctggcttgtagagtttctgccgagaaatctgctgttagtctgatgggcttccctttgtgggtaacccgaccctttctctctggctgcccttaacattttttccttcatttcaacttcagtgaatctgacaattatgtgtcttggagttgctcttcttgaggagtatctttgtggcgttctctgtatttcctgtatctgaatattggcctgccttgctagatttgggaagttctcctggataatatcctgcagagtgttttccaacttggttccattctccccgtcactttcaggtacaccaatcagacgtagatttggtcttttcacgtagtcccatatttcttggaggctttgctcgtttctttttattttttctctaaacttcccttctcgcttcatttcattcatttcatcttccatcactgataccctttcttccagttgatcgcatcggctcctgaggcttctgcattcttcacgtagttctcgagccttggctttcacctccatcagctcctttaagcacttctgtgtattggttattctagttatacattcgtctaaatttttttcaaagtttttaacttctttgcctttggtttgaatttcctcctgtagctcggagtagtttgatcatctgaagccatcttctctcaacttatcaaagtcattctccatccagctttgttccattgctggtgaggaactgcgttcctttggaggaggagaggcactctgctttttagagtttccagttcttctgctctgttttttccccatctttgtggttttatctacttttggtctttgatgatggtgatgtacagatgggtttttggtgtggatgtcctttctgtttgttggttttccttctgacagacaggaccctcagctgcaggtctgttggagttttctagaggtccactccagaccctgtttgcctgggtaacagcagtggtggctgcagaacagcggattttcgtgaaccacgaatgctgctgtctgatcattcctctggaagttttgtctcagaggagtacccagccgtgtgaggtgtcagtctgcccctactggggggtgcctcccagttaggctgctcgggggtcaggggtcagggacccacttgaggaggcagtctgcccgttctcagatctccagctgcgtgctgggagaaccactgctctcttcaaagctgtcagacagggacatttaagtctgcagaggttactgctgtctttttgtttgtctgtgccctgcccccagaggtggagcctacagaggcaggcaggcctccttgagctgtggtgggctccacccagttcgagcttcccggctgctttgtttacctaagcaagcctaggcaatggcaggcgcccctcccccagcctcgctgctgccttgcagtttgatctcagactgctgtgctagcaatcagtgagactccttgggtgtaggaccctctgagccaggtgcgggatataatctcctggtgtgccgttttttaagcccgtcagaaaagcacagtattagggtgggagtgacccgattttccaggtgccgtctgtcacccctttctttgactaggaaagggaattccctgaccccttgcgcttcccgagtgaggcaatgcctggccctgctttggctcgcgcatggtgcgctgcacccactgtcctgcacccactgtctggcactccctagtgagacgaacctggtacctcagatggaaatgcagaaatcacccgtcttctgcatgactcacgctgggagctgtagaccggagctgttcctatttggccatcttggctgccctcccgtatatggagcattttgaaatataatttttcctaccatattctttgtgtatttcctctaattttcccttcttttgatcttagatgcttttagaaagtctctctttgcttacttgaaactactctttcctaaagtaagaaagaacttaaattttcaaagaaaaaatgtatatataaggtaaatagatattattgttcatactcctatattattatttgaaatacacaaatttgttgttagggatgacaccaagccttctgaaccctcatcaggtcttctagaacaattgcctgctctactattaactatgttgcttgagatcaaatatttaaccctttggtgccatctctaaagtaatcagattagaaattagatctccagcagtttataagttgttgcacttttttgaggattttagatttaggactttcattttaatgatacaaaataaacaattaaaagcatactctgcattgttaggatgaccacttgagtatgacctctgatttcaatgtttatgatcatgtaggtgggtttacttcacttgctagaggctaatgaggaaagaaaaaaacagacacatataaatgaagcttccacagcaaggagggccaaatggtgctgtggctcactagaccaatgagggttttgcagaaacttaaaagaaaaatactgagagaattaagttaacacataatctatgggagtcatcgtgtcaaacttgtgcttactcttagcagttagtgctatagtattctattacattagtgccagttatttcagacttctctggctttttaattttgtttatatttcatttgtgctataaatggaatgtttgtattcctccaacgtttttgttgttgttgtgtgtttgtttgttttttgttaaaacctaatccctaatttgatggcattaggaggtgagggtctttgagaggcaattaggtcatggaataagtacccttatacaggaaatgtgagagctctctctctccttccaccatgtgaggacacaacaaaaagttggttgcctgtggatcatgacgcaggcccttaccagaccctgaatcttcgagtgtctcaatattggacttcctacagaccagaaccgtgagaaatacatttctgttgtttataagccactcagtctatgccattttgttattacaaccctaacagccaaggacatttataaataagttttaggcttcttggttgttaaagatctgtaaacatagagtgttttatgttttctctctatacaaatttaaatagaattttaatgagtacaattttatattttatattctagagaacgttttcctttgaaaagaggtctgtgcttcattgaagtttgagaaatattgaataaaatcttgatttattaatcagttctgtttttcattcccagcatttcattatccctggatgtttccctgctttcaacagtcgccaaggaagagagaacataggagaaagagagaacgaaagaattgatccttggctttgagtttcaaatggcacaggctctgacgcgacaaaagattaagcagaaaatattatcagggaaatgtttatctgcactttacccttatcctcagacatggtcaagattccacaggactaaattcaaaagtaggaagtaagggagcaatagaaatcccaaacagatttagagagtcaggtataggaagaatgtggcaaccatctccaagtaaaacccaggaagtaggcaatcctttgaagtccttctcatctagaacaggtaggaacagaaaaagtctcctgcctgaggttgcaggcagactggcctgcctcagtctctcagtttcccaaactcagcgtggcactagaaaaattcagtgatgccccaaagaggctctaaggataggtttattacagcccatcatgggatcaggagtagcagaatgcttcctgtggacgctgccttggagtaggggtcaggggtggctcagagtgctgccgaccagaagagttattgcaggcaggaatgaacaggacagggtggagacagtgcggagaaatgatggagacccagacatgacccacgtcatgcccacccatgtccatatagtcctgccaggtcctggcactacataagctgcatggagaagggaaaagaggaacatgctaatccagtggaatcaggcttctgatacctagtgcaatgatagagcaaaacagaaatgaggtttacttgcataaaaataacatcaaaacaaacaacaacaaatctatcctttctctgtatctatctatctatctatctatctatctatctatctatctatctatcatctatatcatctatctatctacctgaagttgtagtgggtgagaatcattaggactctaagatcatagtcaagtttaagataatgtctatccttaagaatggaacttgaaaggttagcatgtactaggaaaaatgcagcaacttgaggaacccaaagatcaatatttttaaggatctatcttcaggatctatctagctctaaccatttctgaaatttctgcagcgttggacttttgggtcttgatgttgataataccaagcaatcatcatgatcgagtcctactgtagaagcaaagtggagcccacttgtccactgatccccactttgtatgcggatggagtttgggccaaaaatcggaggtccagacctctgatgtcttccgagtaaagctaagcttttgtgccattttggagatagtaacatgcaaagatgggctgccagccacaataagatgaaaataacgagaaatagattttgtgtacaatcaagaagtctccaagtagagtgtcaatgctgtgattcttgatactgactgtctactggtaaatggttcctgggtcacttatatttgaatcagggccacctggctcttgggcagatgagttgtggcactaaacttcagaaagctgatccactgctcagtcatctgggaaaactgaggcagcctaccaggcccctaaatataatctgtagtgtatttgtcttaaattgattagaaaaacagaaaatggaaggttgtttccatactcatctggcttctaggattgatataactatttttcccttttttttttctccaatagccagggaggaaaaatccagtctcatcccactgatattaagatagccaaccttctagtgttttagagatcagattgtattcgctttctagtttttctaagattgtaaacccttagtagaaagtcttctacacctgatgtttttctatacacaatgtcaatacttagtacataaatataagatttttgatacatttgacaattcctattctgctgagtccaaatttccgggaatgtctgataatgtacagagaagctacaattacagcagggagatgaggcttgatgactacccaagggtacgagaagctttgcagaaggcaatggaacaatctagtttggggcaggactgccaagaaacaagttctttcaaaagtaacaaagaaaatctcatcaaattggatttcacacagacataaggctgtaattcagctgaggcaaacagcagggaaaatcattttcttgtccacttcaagtaacaaaatgattcccctcctgtcacttctgagttgattttgttcttttgccttcgaaagctgaatgaaatataaaggagaggttgtgcatctatctataagtttaaaaaaaaaaaaaaaaaaaaaaaaaggaaagctatactcagtgggaaaaatggaaagaaacagttgagttagtatctctgggacttaatctagaataaggattccaaaaatcacaatttggtctgctgttgggggagagattgttccccatgtcttccttaagcaccaaaaacaattacacagctccagcccatgtgcaagcattagcaactattctgggattgaatccaaatttgagcatgtgtaatagatgaggattttccacaatgtggaatatttgaacagataacatcagaactaacagttaatttattttttaagtaaagaagaaacaaaccataaaaacacaaggcgtttcttgctaaggttcagagacatattcagtgaaatacgcaaataccttaacaagaaataggtgacatttgacttaactctaatacaccataattagtttctttctccatcaaaaatcaaagttagtgtattttgatctaaagctagaattgagatttctctgctttttcttttggctggtcatatgaatcatgcttaaaatgggaaagccagagggtttgatgtggtccagacctatccgtagcctgtttcctatccctgattcagtcttatcagagctgtcccataatctgtacaactacccatacagcttcagaatatgataaagaaaatagacagaggttcttacatacagaaataaggcctcctcttttgtctctccctgcagagattctacaaatctttgagccaaggagattatcaaaatgactcacttttaaacaaacaaacaaacatagctcaccagtgttttttagaatgcaagaaaaaacacaaattggaaccaagaaaaatctgttaattgcttagattctttatttcccttttatgtttactgccactaattagtctggattatccaggggcctaaataaaatagtacgatctaaaaatgcatgtgttgcttttagtaagaatatcttcacttttttcttaaaagtgaagtaagactatcttcacttttcttaaacccattctattaaaaaagaataaaaaaataaaaaataaaacaaaaaactttactacattctcatctgggtcatgatcagtgctgaaatactaaccacaatagattctaactttgaaattttgacaatagttatcatactccgagtgtttactatgtacccaaataccaatactaaatattcactactcagtactttattataaccacatcacaatactttgaaacacagaatcattaaataccatcattttccgatgaaaaaactcaggtgtaggaaggttaaggaatttgctcaaagttatacagctagtaagttgcagagacatgacttgaacccaaatctcttcgactctaaattcagagctgttgaacttggcagcagtataaagtcactcctccactcaagaaacaccaatgattttatatcttatgccacaataaaaagtaaaaagactcaaaaataaaacaaaacttaagatttatagttatctggccatttcttgttagtttaatcttaattttcaccagtcatccacatgggtccccatgctaccaccccatgttccttaaagttcttacaagggcccagttcacttttgtcccttccctcacattgttttcctcacagtagtcttctgaaacgcatttcctgtctctccttcccataatcccactgttaccccatgtgcatattaaactcccaggccatgtctctataaccatacacagtttaatacagttgcaatccaagttagtgttcatcatttagctgctatagatagtagttggtgtcatgtagcttacatttgtatttcacctaaagtaaaccattatctattaaggtcagggactacaaatttataatttgattttttacctcaaaacacactatgaaactcatagagagctctaaataaattcctgttgtttaaatgaataaataagagttcattacaaatataacaaagtattttcacatgaatttcctagacacttcatattggtgtgagccacttcaaaacagtacaaaagggattaaatacaaatatatctttttaatacttattaaaatgttagacaattcagctttagtaggagtttaattataaaatgaaaccaagcaaagcctaaatacctaattcaaaagatttctgttctatagtgaaagacagatcaataatgataaattggatttttagcctttgggaataaatggggaaccaaaaagaaaagcaaaccttagtaaagtaattctggtctaccactagtgagtggacaaaattattttacaatcagtattacattctattggaatgaaaacaagatatattaaaaccttaacatgataaatagatatttgatattatttgtccaataataatccttaacagatataagcttttttagaacatctatgtaaccaaatgtttttgaaagaggaccaatccatttgctaaagccataaagtcatttagaactactgataataaacagtgacaaacagtgaaggcgatggtttcggaatacttcactttccttttcattcctttttccctcgcctttacaccagcaaagaaaaagtcatcataaagccaatgaagctaaagctctagggctacctgcttacacaggcttcgtcaaagtctatctatttataaatagcaagtaagatttttaaaattccttttcttgaagagtgccctccaaactgtttaagcttcaggtcccacaaaccttaattagtcgcatccttgacctgaagcatgcatgcccttggaatccaagaaacttaaaattccatttggcaaaatttgctgttgttgttgtggctttcttaggctgttggtttcctaattcgttcattcattcattcttcattcatccactcatttatccaaggaacagagactcatcttttgcaggcagagatcatcgttcttacggctttagagtgactacaacttcctgtctcttgttctatggcttctgccactaacaggtaaaggcatcacgctttcctctggatagcttttctgtactttatgccttccgtttttttctcatcttttgttgttctctctattgacctgtgcatttttgctacaagtagttacttcatcctatatctggtttatggttcccaagattggttttgttatatctgtagttattccttgttgggcaaaactttcagagtagactaccagcagattatttgcaggccataataggctgctcactataacatgccctgccctggtcaaacaaatggaagaaaccaacaatcgatgccttccatgaatccacttttactttctttctttttcttcctcacagcattattatttcaccttcataaccagaaaaatataattctatccagcattataattagtcaaatatttcatgttttatttattttttctctatccccacagggcttagtgttaattgaaataatatcattataattaattaaaatacaaatacagctaccatcatcttactatgtgtttggaacacaactattgttttcatgtgtcacttcccctaattctctccaaaccccttgaggtagttgttactccattaaccatttcacaaacggggaaagtgagactcagagagcttaggcaggttgctcagttaataagcatggttgctaggatttaatctaggaggtctaattctagagcagcaactttcacttgtgaacactggaatcacctgaggagtcttaaaaatccaggtcccatccccagagtttctgatggatagaagatgtagcctggccggggttgccgggggggggggggggggggcgctgtttttcatcttcctcggtgattctcctatgtcccaggtctacagaccaagttatttaccattaggtaataaagagtgaatggacaattgaatgcattaatgcatgacctccccattctctattttttaatagataggttctgagagttccatttaaataaaaacatcaataacatctaattggcctctcagaaaataatgaaacccattttgtcaaaattgatttaccctgaccaaacctgttgccaaagagttaatgctctttcccggagagaggcagtgaacagattccgtaaatgaccagcttagtctaactccctttttcacgtggacaggggccgtgttggggaagctgcagagcgcatcaaactgaagctgtttgaatgggcccctaggtccatttctttgttttatgtcctccaattccctcagcctattatccttaatgtgtcatccctacttgttttgcctctactggggagtgggagcctcagcgctacaggcaattagcactcagagtaggcaatgggagcttcattttctaccctgcagccaaattttttgttagtcacagtcaaaccaaagatacagaataaagaacctagacaaaactataaatacttaccaagcaccaatttgttatgtgttagtcactgaactgacattataaagtgactaagaaattcaaggagttaataacctggggtgggtgagaggaggataggcatgtggaacaagatgagttgtgaatatttaacttgtgtgtgtgtgtttgtgtgtctatgcgtgattcagtctgatcatgctgaggtttgtgaaccaccaccttatcaactagttctacctactccttatagaactgaggggctaactaaacaggcatccagtcagagcatctgtgacaattagagtccaatccacaaaccctgcagcaaacggtccaggaagccaaactgcaaactctgcagcaatcagcctagagcaggtaggtcttggccaataacaaccagcgtccctgacttttgccttgcttccaactcaggatcaaccaaagaaaattaattatgctccccaaagcagtcatagaagatgctccacttctaggtaacctgccctcagcttccctgtgccaacaacctccaatcagggcactcctgaagccttcccattttgcattataaaactttcccattcccgtgtctgcctttgagtctttgccaaaatgcaagttgcaagagacagtggctgactcccttgctgtagcaagttctgaataaataacctctgtttcttctcatttaaattgcctttgtttatttttacagtgcaagtgggtggtggggggtggtggtgcggatgctgttttgaaattttaagctcaccctctccaagcaggtgaaccttctcatatgtgtttccctgaaatctccttgcctcccccttaagatgtgtgtaggaagggggaaggcagaatgacagaaagagggaatggcacctgcatcaaatccagacagatcaacccaaggagacagaggcttgacttcttgccagtgttacagtggcatttgaataagaacctaagaccttagcctcaacctctaaagaggaatgaaatcgtgaattcagtcaccattatgtttgaaatgacagaaaaatcacgccatccattgagtttccttagatatgatgaggtttttgaaacatcatatgcaatgaacattcaagcaggaatcaagttcagttagggagaaatacaattatattttgtcatggttgaatactcagtggtgctaatttgggttgcctactttggaagtttagagaggacgatatgcactgagaaagggcggagctcagggcccaaatggtggaagaggtagcattttgagctgaccaggaaagatgagaattttgagaagtggaactttagcttcctccaggctccagagacattggtgcaaatgtcttattgaaattaagcacataagtttaatgtaatacagaagtcagtgcagtggctatacccctgtccctttgctggttgtcagctcagtgggtgggtggatgctgtattcactcaaatctagaaagttgtgagtacactgatgtctgtgggttgggtcacaccaacccacagacatcagtgtactcacaactttctacatttgttgctgaggttctttttaatttctacaattattcaacatgtgtctgaatgctaaaaataactagcgtaaccaaacatagagagaaacattttcttgttaaggctgagtttttaaacaaacaaaaataatgcctttccccactgcctaatgtacatttttaaatcatagaaattgggttctttgttaaattcactgtccctctttctctccaacattgatattagtaagacagttttttttttctcccttctagaagaatgtggcagaatgagcacaaagtaattagcaggtttagttagaagttagaaactgagaggcaaatgaaattaaagttggggtaaattaattagtaaaaggtgctagagttgtgtgtgctccttaactaagtgttgtctttcaatgtgtcagcactgacaacactttgtgaggtttagaaacacagaagaggaaaggctgacaaccagggagccagaacgggaaggtgttgagcagggtgtgagactcctgggaagggaagaataggaaccatccctgggattgttctagccttcccaatcctttcctctgaggttcagcagtgcaagggagaccatcaggtcaacgtgggggagggtacttggcccatgtttctagacatcgggaaatctgtgctgaggagccttggaggccagtgtccattcataagagcctaaagtccttacgaagaaacaaaaacaaaaacaaacaaaagctgggcctgtatattagttttctagggctgccatagcaaatatcacagactagggggcttaaacaacagagaaatctgttttctcagttctggaagctgtaagtccaagattaaggtgccagtagagtgttttcttctgaggtctgtcttctccccgtgtcttcacatggtcttccctccctgtttttctgtgtctgtattagtctgttctcacactgctataaagaaatactccagactgggtaatttataaaggaaagaggtttatttgactcacagttctgcatggctggggaagcttcaggcaacttataatcatggtggaaggtgaaggagaaacaaatgcacatcttacgtggtgacaggtgagagtgagtgtttgtcagctcaggaaaatctaccatttataaaaccatcagctctcatgagagttcactcactatcacaaaaacagaatgagggaaaccgccctcacaatccaatcgcttcccaccagttctctccctaaatacctggggattaaaattcaagatgagatttgggtggggacacaaagcctaaccatatcagtcctaatctcttcttcctgtgaaaacaccggtcttactaaattaaggcccacctcaatgacttcaattaatcttacatacaagtttgaagagtccatctccaaatacagtcacattttgaggcactaggggttagaatttcaacatgtaaattctggggaggcacaattcagcccataacagcttgctgaagaattctgtagaaaaggaagctgagtgtgtgacagtttgccccactgtgtgctttaaaatgaactagcttctcgaagaatacataagccatcttattctggaatggcataagtgctttcttgtccccaattctccagcaaaaccggctgggcaaggcaggagacattacaactaccaaagctattccaatccatacacaaccccaggtgactcctacatgaaatcagccggccctttgccccactgctgtccggcccccttatgcagaaaaaggagtgcaaaggcaaagggagaaggcatataggagcttttacacttagaaattgcagagtagttatttttcatatgtattaaatcctggttttcttggttgatgggccattatgattagaaattttacttgatggtatgaaagcatcttgctgttttctttgtttaattatttgatggtgagtaatcacatattcaagcctaagtcactcgttacatattttaataagaatcttttgtcttagaaagtaaaagtgctgactgcatgccttctcatttggaaggcagcatcttgtaatgaagtcagcaaagacagagaacatgttttattaaaatactacttctaattccatctgtgtgaccttgagcaagttacttaacctgtcggaactacatatttctcattggtaaaatacaatcatgtaaaggagaagtaagtgagatattgcatacaaaacaacaagcatattgcccaaaacataaccttttgcttatctaggttaattatgcaggtagattcccatgtttccagtacgatgtcatgaaaataaaaggaccccatgcaaggatcccaaaagcctgattgtaagtccaatttgatattttgttcaatcacttggcctctgtcagcttcagaattttgaatgttaaattggaggcaatggccatcttttgaacttgacacaatttatcaagaggatgaagtatgtaaaagtatcaaaaatgagtcactggcaggctctgataatgagttaggagcatctccttcatcataaagagttcatttttggggacaaagtattaactctttgcaaattactggaatgattaggtaaaatttactaaaaatttctcttgtaggaatcatttctcagccaaacaatgtagcctaaagaaagtggggctaattttgcagatcaagttttttttttttttaagtgcgtacacattttgaaaatcaatattttcccccaggtactcagggttaaattgctcttgtaggaatcatttctcaaccaaaacaatgtagcctaaagaaagtggggctaatttttgcagatcaagcttttctttttaagtgcgtatacgttttgaaaatcagtattttcccccagttattcagggttaaattgttcttgtaggaatcatttctcaaccaaaacaatgtagcctaaagaaagtggggttaatttttgcagatcaagtttttttttttttttttttaagtgcgtatacattttgaaaatcaatattttcccccagttattcagggttatctgataattcttagcccagtggaaatggaaatggtacctgcactccacatttcctaagttctgaatttgtttgatatatgttgttccacagtcattgtttccaggtcctacccctgcatccaacaataaacctggtattcaaacaaagcagatgtcgagaatgaggatgaggaagtgaggtgagaagggcacacatgtgaagaggacatagggcataccctctagtactttcaactttaagttgattctaggacattaggatgacaactgagtctggtaccttgctccagttctagtttctacctgaaggactctagagatggggaagtttctgtcaaagagtttcttctctggacattttttcccctttaagctactggttaaaaattactgttgactggctgggcacggtggctcatgcctgtaatcccagcactttgggaggccaaggcgggcagatcacaaggtcaggagatcaagaccatcctggctaacatggtgaaaccccatctctaccaaaaaaaaatacaaaaaattaaccggacttggtggcgggcgcctgtagtcccagctacttgggaggctgaggcaggagaatggcgtgaacctggaaggcggagtttgcagtgagccaagatcgtgccactgcactccagcctgaacgacagagcaagttaaaaaaaaaaaattactgttgactttgacttttgggtaaaatatgtattcttttatttatctcatttatatttattgaatgcctgtaatgtgacagggactgttctaggaacctgggaaacatttctgagcaaaaaacagaaacatccctgtcctcacagagcttgtgatttcaaaattatctttttctgagttaaaagtcaaccatttgtttttaaagacatggtggagcatggcaattttcaaactttttgatttcagagcctctttacgctcttaaaaactgttaaagactgtaaagaacttttgttgataccagttatatctatcactatttactatattaaatgttaaaacagaaatttaaaacaataaacaattttaatttattaaaataatgatataaaaccattacatgccaaaaataactgctacagaataaatatttgtatgcccctaaaattcacacgttgaagccctaacccccaatgtgatgatacttggaggttattgggttgagataaggtcatgtgggtggggccctcgcaatgggattattgtccttaaaggaagaggaagagataccagagtactctctctccactttcatgtaccaaagaaaggccgtgtgaatgtatagcaagcatgtggctgtctccgagccaagaagatggccaacaccagaacataaccacgctggcaccctgtgctcagacttccagcttccagaactgtgagaaaataaatgtccgttgcttaggtcacccagtctgtagtattttgttacagtagcccaagctaagacaataacatattttgtaaaaaaacaaaaaaacaacaaaaaaaaaacaacaaaaaaaacctatattttctttaaaaatcatgagaaggacactgttttacatttttaaaaatatatatattttttgttctggtttaacagaatagttgtattttcatggctgctcctttattcaacttgtggtatcaacgtcatacagtgtttggaaagtcccactatacatttatgagagaatgagaaagaaaaaggcaaatcatgtattaatattattatgaaaatagttttgtcttcatggatcccctgatggtgtctcagagatccctgggggtccctggactacgttttgagaactgatggtatagtgggaaaagtgcctctctgctaaactgagttttgatctgtgatcttgagaaattttttcatctctctcaacctctgcttcttccatctgaaaatgagtcgtttgtcttacaaaatgggcagaatctttcccatctgtgaccttccttgctctgtctgccctctttccttcttgagttggccatttagtattttaatggaatggacttagttttctttttcttcttcttttgctctccacattatccccatattcctggatctggcactaatcagggctagcataaaagaaggggggtctttgtgatatttgaagcttaaaaaggtacagactcctagcaaaaaagtccagggctagtctatgcagcctcaccttgacagtgcagctgacatagtattgacaacagatacctgaccccagaatggacaggtaagggcagctttctttttatttatttttcctctccctcaagagcatgatctcatctacatgatctcaactccattcagctacatcctgaaaaactgtgatgactgacaaaaggaaccgaagtgggactttgatatgggcaaataagaagcaaagtagtttagaaatatccaagacaaatagaattccccggtgaagtcagccccacttggagacagtggcttcataagtcctgaatgatgcctctgcccctaccttttgctccagagaagcctccccagtctgaactctttgctattgagaagccagcgtgactagatgaataagcagtggttctcggacttgaatgtgcatcagaatcagcaggagggctttttttattttattttgtcttattttattttattttattttattttattttattttattttattgtgagacagagtcttgccctgtcacctaggctggagtgcaatggtgccatctcagctcacagcaacctccgcctcagggttcaaatgattctcctgcctcagcctcctgagtagcagggattagaggtgcccgccaccatgcccagttaatttttgtatttttagtagagacggggtttcaccatgttggccaggctggtcttgaactcctgacctcgtgatctgcccacctcggccttccaaagtgttgggattccaggtgtgagccaacgcgcctggcccatcagggctttattaacacagatttcagggcccatttccacagcttctaattcatcaggtctggggtagagttagagcaattgcatttccaacaagttctcaggtgaccgcacgttgggaaccagtgcaacacagtaaattatagatgatttgagctaaaggatggcaatgagacttttggactctgaatgtctctgtaatctgtttacaaaacaaccatactaccaggcctccaacataatagtttgttccattctaacctcttatgattaagggtgaagtaaaaagggtcacatcactcactatatttttagagtagttattctaagaggagattctataaggagcacactataacctttttataaagcttattttctattttatgttctcctgcttggggtgggagggacttctagagggatggcaggggttactatatggttaaagccttaatttgaacaatttctttttagtcgttacagtgcagatgtaaagtattagcagtgaacatggggcttgagttcatgattgagacagggtataaataccctgcaattatcttaggcagactgagcctgtaatctttccagtctgggtttagcttcatttttccatgaccttttaccaagtataaacacaacgtcaaagattctaatggttgaaataaatgcagtctattatgttatacaaattaagatcagtgtttggaagtccagggctgaaatcagaagattttgtggagaccattacggccatctggtaagttctccctggccttatagggccaagagatgagaagataataaatcagttaagcacttggcattgtgtttgtttcacatacagtatctcatccaatcctggtgatttcttttggtagtgagagcgactacaaatagaatccctattcaacatacaggaaaagagaggctctgagaaatcaaactatttgtttcaaggcagcccaactcaaacagaactcagatttgagccattgtgtatctgactctaactcccacagctctcaggaaacacaaaattcaactttttgacaatgaatatttatcaatatcaactttgttgagagaagagaaatagcaaaaaaaaaaaaaaagaaaagaaaaaaggtttttgtctcttggtatttccaatttagtgaagagaaataagagtgtttctggaagggatcaagttcaccttctcattttactcatgagaaaaccaaggtccagagaaatcaaatggtttctttgtagacaaaaagcaagtagcaagggtgtcttgatacctttaaatctacagagaaatgctgaacaattctttctaatgaaaaatttgcttatttaaagaattctttttgctttcttgccaaagcaaaccttccaggtagaaagaagactggtatctaggcttttacatgggctctctgtcaaggtcaggcatgaatagcaagtcctaaattctcacctgaccttgaaggtcctgaaatgctctttctgttcctgcaactggccaagttgttttcacctctggacctttgcatttgctattctctctacctgggatattcttcatttggattttcatgaggccaagtcttactcatcactcaggtctcaactcaagaagatcccctctaagaggtcttccctcttggctgtcctaagagcccaggatgtcagttctcttacagggcaattgcttctgcatcccattaccagagggagtgtgttctctgggattaactggctttcctcattttactgtctcacttccccttctctcaccatacttactgagatcaactccctaatacatcacttgcctttaattccttcttttggggtttgcttttgtgacaacccaaacacagaaacgaaatcttattcaacctgtctctcatgactctgattattttttatagcacttattactactgtctgaaattattgtatttattaacttgtttatcatctgcacttccatcttacctgactctccgcactctccccaacctcctccaccccatcagacgcctaatagaatacaaacactgtagtggcatgactttgcctgtcctgttcactgtggtatcccaaaaacttagaacctagcccataataggtgcttaacatatgtttattgaagaaatgaaagaaacaaatgaaactctccaatgtgttaatataaaggaatcttggctagtaaatcgtgattttgaactactaaatcaaaggctttctctgtttgcttcagtcccatttagattccattgttctttccatttttggagggaatcaatccttaatcaatcactttttgctaagcatgctgtccctgcacaatcaaaagttaacaaagatatataaaaatcagtccaggctttggagccaaaaagttcattatctgcctcaatcaatatttataacaggtatactgaagacatgctaaagcagaagtctctgttcctttgctttccttccatcacatttgccttgcataatcatctatgtttattaaaagggttcctggtctgttcctgttaaacattgaccttcaagtgcttgacttaataagctggagaattacaataaatcagacagccttgttcaatcattgatattacaaagaattgcaaggagaaaccagaacagcttgaaaacacaataaagtacaacagctttcatagagagtaaaagggaaagtcaagggaagaaagtctgttctcagagatgctctcatggaattaagagagcagaatcccatggcattcaagactgttttccccctgattaaaacgttttgtcaaagcaaaaatcaaatgagtacttgcttatgaagcatgcgatgtttcagaacatgacacaggaatcataagtgttcaaataaataaaccccattcaggaaaaagagcatttgtcacagatttttccctatatgaagccaatataggagactataaggattgagggtaaggatgctattccctgaaatggtttgcctccataagagattataaggcaccaaaagtgcagatgtctctattctatttaccaactccttctcataaacccggtgcctagaaaagggcttgccacatagtaggtgatcaatgcatacctcatttagagaaagaatacagagctatttgtactttcttgggagcaaaagattctcatttgcaacatgtttaaactagcatagcccatctttggcttacgttattatcagtaaggagcactatgattatgtgctatttcttacatatcttattgcatccccagaaacagataatattccatttagataagtcttgtgttaagaactgaattctgtgtgataagtaaaagattagtatttggagccaggcgcttaccattctaagctttcttttcctgatatttaaaatggggctattaatgctaatcactttataggcttgacggacagattaaataaggttgttgatatggtttggctgtgacactacccatatctcaccttgaattgtaataattcccaggtgtcaagggcagggtcaggtggagataactgaatcacggcggcggttcccccatactgttctcgtggtagtgaataagtctcatgagatctcatggttttataaatgggagttcccttgcacaagctctcttgcctaccatcatgtaggatgtcactttgctcctcctttgccttccaccacgattgtgaggcctacctagccacgtagaactgtgagtcaattaaacctctttcctttataaatttcccagtctccggtatgtcttcattagcagtgtgaaaacagacagcatctatgtagcactcaggacaaagtagacactcaatacacattggttaacctcacatttcacgggtgagaaaactttggttcagaaggattggatgaccttctccaggatcaccccactgggaattagtgaagacagaatttcagaaaacaaaacttcagatctctctgaccacagaacccatgctcttcatccaagcatcattgtgtccacggcaaggagtgtaattcaggtgcaaactttgcatattttcatttcagtttacctggcttacatatagtagctgttggcatcaaaagtacttgcttttaaaatgatgaactggctgctgttgactttgggaatgggagtgaatttacgaaagttctcaaccttggggaatttttctcactttataatatagatagacagaaaacttgggtcattttaaatgcaagatatttaggagtggattcgctaagtttgctatttaaaatgtgtctgataaaagttgatgttcttgggataaatgtgtcataagttgagataatgtaaccagtgttgaagcagaaatgttaaaaaaaaaaacagtgtgaatgtaaatgatgttttgtatatcactgactcaaagacttcttacataccatcctcctacctatacttcatgctgtattagctgaactataaagtggcaagtggcaatgtgattttcattttctcccggcaaaacgttttgacctaggagggagccttgaatgaccttggccttccattccctgattttttactgttccttttttttttaatccttctatatcctccctcatatccctaagccatactgaatgtcttgcagttttgttagtcttgatgctacattagaatcacctcgcaaaattgtaaaagttgcagatacctaggcatcacttgcagagagtcttaatcagttgcttgaggtatcatttctaaagatttcctaaatgattctaatgcatagctgtgtttgagaatcaccgcaatttttctgcctctgaaccattacagaagttaaaatttctttctttctctttatcctctgtgtaattcctagccattcttcaaaatgcaattcagaaggcactagttccaagaaacgtcatcattgcataatgttggtctgcctttgtatttaaaaatttctctgtgcttcatgctaatccacaatagatttcactaaactaaattccttgaacatgaagacaagccatggaaattgtttgtttgtattcatagtgcctagaattgtccatgtaggagctatttaaaaatatgttaaaaatgaatgagtggttgagaaaggaattcttaaaaagaggttaataactctgggtacttgtcctggctgtgctgtttacaaatttgccctataactctgatgctatgttgactgcaattagatttaaaatactatagtatataaagttaaacatatgcatatattatgactcagcaatttcccacttagacatccaaagaaatgtatagataatcattgagttataatggggttacagtccaatatatccatcataattcaaaaacactgtaaattaaaaattcacttaatatccctctaaaccctttttaaacttacaaaatcataagtcaagccattgtaagtccagatgctccttgacttatgctgggattataacccccaaaaggccataatctagttgaaaaatcctaaattgaaccattttaggtcagggaacgtatttctgtatatatatgctccccgaaggtatgtagtagattgttcatagtggcacatttttaataaccaaaaagcaaaagcaatcatcaatgtccatcagcagcaaaacggataaaatatttgtggcatagacacacataggataccatgtagcaacaagaatcctataaacgcatgcaatgatgtagatgaataatagataactttgaacatatggagccaatcgcaaaaaagtacactattgtatgttatacatttacatatagaactaaaaccaaaaaagcaatctcttctttagaagtcagggcagtcgggtggatcacgaggtcaggaaatcgagaccatcctggctaacacggtgaaaccccgtctctactaaaaatacaaaaaaattagctgggcatgctggcgggcacctgcagtcccagctactcaggagattgaggcaggagaacggagtgaacccgggaggcggagcttgcagtgagccgagattgcaccactgcactccagcctgggcgacagaaggagactcagtctcaaaacaaaaacaaaaacaaaaacaaaaataaaaaccggaagagggcaatgattggaaggaagcacaagggtggattctggggtgctggttgtgcttttgatctggtcattgattaccctgttgtgtccagtttattagaaatacatcaagcagtacactttggatatgtatacttttctgtatatacattgtacttccatgaaaagttaatactttggtataaacaatatgatagatttgtatttataaagtgactttgatctaaaccttagaaacacttggttaatatctgaaagaatttaccttccaggtatggcttctcaaatggggccattgtattggatggcagtgttaatcagtgttaattttttcagtcagagagaggtaccgtggtaatgaggagggcgtgtgatggagattgtgtgtgaaagatggagatttattgtgctgtcctgacagatgtttactaagttttaaaatatttcaaaataaataatttaaaatgtgaaaaaaagagaattttgttgcccttgtttcagaatcttccatgcaaaatgtttatcaagcctcgtaaaagcaccaacaacaggaatttcaccagccatataagaacagcctgtttctgtttaacttgttcttctatcacttactattaaaagttttgtccctttgacagaatcagatttgccacttgtatttgtaatacaccaccctataaatcattaaaggcctccaatgttcacccaaatcctcatacttgtggaatgaatatgccggattaggagaagccatttatcctcttggatactggatccagattattctcatctgtagagcattgggttgtatttgatgacattctcagtttttaactttgatctagattattattaaaagtgcctcatttctctctcagaggtgtcttggttttgaaaataattatatggttttcctgcttccaaggaatcttccagatttagctttctagacatctatggttttaaagatgtgaactagattcagcagaccactgaagtgcggggtaggcatctccctgtgtgtttgtccttgtgtagcagatgcagatttataacatgttagaataagaaatttttgcggccaggcacggtggctcacgcctgtaatcctagcactttgggacgctaaggcaggcagattacctgagctcaggagttcgagaccagcctgggcaacatggtgaaatgtcgtctctactaaacgacaaaaaaaaaaaaaaaaaaaaaattagccaggtgcctgtaatcccagctacttgggacgctgaggcaggagaattgcttgaacccaggaggcagaagttgcagtcagctgagatggtgccactgcaccccagcctgggcaacagagtgaggctccatctcagaaaaaaaaaaaaaatgttttgcaaatgtcaaaaattcaaaaataatcccttttagggaagggaattcattaattgcctcattgctaatgattattacacatgctaagatttcccttcttgagtgatgctgaaagtaggacagaaggatcacgtcattaagacattcctgttttcaatgtctctgggtttgtcctatttacaatcaaaagttgcctacttcctcacatacacaatgttaatgctttattttcaaaacctcctgggtttaacatgtgtaattattaatttattcaacaaatgatggagagagagagtacattatctgctatgtgccaagaacttaaaagggtcagggcagattattgaggcaaccggaaaatgaggatgattccttcagtccttctgcatcccatatttccatggagtcctgtgggtctttatggcaactcttgttttcttaaactcttattccctagtccacatcttgtgctaccttttcttgtcttctattctgcccaggctccaaggttaggcaattcaactatcatctccctgaattaatcaaccgtcttcatcttccatcatcctaatctatactgctcacttagtaaatttagtaaatgccacttagtaaatgccattcctatttgctaaatactgacagttaagacaattttaaaaatattactacaatttcttctgattctgccataatttcttgttatgtgatctcagtgaaactcatgagattttttctcatttcttttattaagttgtattttgttttctaatttttactctcaagccaccaactttcaaagaaggaaacatacacactagaaagcccagacgttttgcttcatggagtagactgaggccattagtttccttttctaactcaaagtttctctgtgtcatcattcacatctttcgacttcccttctgccctggaggaaagaatgtctttcttctttccccagttgcttggacactagtttccttctgtacaattctttcttatctaaccccccaaacccataaaatctaacttgagttctcaaaatgagactaaatttgttctgaggtctccccagaccacccacaggtgacctttgaacaacatgggtttgaatgacccaggtccaattatttgtggattttttccacctctgccacccctgagatagtaagaccaacccctcctcttcctccttcttagtctactcaatatgaagatgacgaagatgaagacttatatgatgatccacttccatttaaaaaatagtaaacatattttctccttcttttaatctttttaataacatttcctttctcttgtttacttagttgtaagaataccacatacaatacacatagcatacaaaatacatgttgatttactatgttattggtaaagcttctggccaaaagtatgtcattactagttacgttttggaggaatcaaacgttatacatgaattttcaactgcaaacgggggtcagcatccctaacctctgtaagtgtcaactgtatttccaaagccaataactcttctaagtttgcttttacatcactaaggggatttgaaaattggccatcctgttcttgaaattctttcttctcttggcttcttctcatagatttttccttctctgctcttccccaagattcctgttccatttcctctactcttgttttctgaaaatatacatcccccaagcttgtgtcctctgcccactattctatcaatataatcccattcactgttctcatgaatctttaactgtcttttaccttagaaagccatattgtgagtcaacacagagctccatgatgcatagccttcggccataaacacagctaggaaatgagggcagaaactaccatgatggagtggtacttcttgacctaggcacctggcccatgctgatggcaccaggagacaaggctgcaaggaaaggtcaactttacaaatggcatcagtagaactagaacatgacaatctagctacaaaattctcacatacggattcaggtaaactccgagatcttttacaatgaaccattcaaagactgggatcacttaagacagtctgcagaggtctcacaaaatggacattttagaaaagatggtcaggttcaccagactgcctcttataaagtatatcattgctgctctctgctggtcaaaagcattattctcttcaattaagatgagcagaggtgtagaatgggtcaaagagggaaagcagtgctttcaaaatgatatggactggtgctaggtaagacttattaaatgacttcatagactgcaatatacattcttatgcagaaacactgattttagtgagggtctattggacccctaaagtaaagatgtgcaaagcatccccatttttgtagaccttttactcatagaaaatatgggctctatcagatatttcttcaaccactaaactagtcaccactttttagtgtagaacttactgtaaggcatcatgtttgtatttttggcaggaaaattggcaagtcctactgaggattattaacttgatatactgcaaaatcctaaaatgttatcttaatcctaaaataaagattaaatctacatatacgtacaatctattctactgaaaacttatttttaagagtgtatgggtagtagtttttgattattcagaatatttgcatacaaagtgtccttcatgagcagcacaaaggggcaaatcttgggctcgaaagcctaacacacaggtttacccaggctctgccacttactggctttatttccttgggtcagctcttgaatatccttgagctccacgtccctattttgaaatgcgggaaatcataatacccacctcctattgttattacaaatattaattgaaatattccctatgaaatgcttaacagtgctccctgcaagttaattggcagtcagtcataactgttactattcatgtaaacagcttaagtagtagtatttattacatcttccaaaacaaaaatattttaccacgggttttaaatatactatgtagatatctggagaaagttgtctttagagctgttcttagctctgacactggctgtgtaatttaaagtaatgtcttaaattttctgagccttgaaatgtttccggatgcttgccgtgccctaaggtcctaacatgtctctatgttttaattttatttaccactgttcagtggcctatggtacaaagggttttgttttctgacctactgttccccacctaatgacttgcctgaagaacaaattaccactggaggaagcgagtaatctttctggagaattagcaaaggataatttttagaaggaacaatggaagcagaaaagtacacacgcacaatcttgcctttctcttttcggatattaccacactaaaatatgatctgactcttctgtgtttattagttcagcaaataggcattgggttttcactgggtttgtaaactagaagttacagtgtgctgaatcttgagaaaactgattgctagaggtagaacaacaagaatgttccagatgtttcctgtcctttcctccattcctccattaggtacctctcaaagcctaagttgatgataattctcttgggatgcaggtttagacatgtctatattaagagacatggcagggagtcctcctccagtccaagcaaactcatcaagttccatactactgctggagggttccagcaatataaattctacagacaaagcagtgtcagtcagaccccagagttttgatacgacttagatataagggttgagtcaggacaaactattaatttctgtcttctgtagtcactgtcccttttccttgagaatcttcctcatttatttgtgacttcctcctttctccaacaagacctctcgtacctttttatgatgctatacaagctcagctgcctccatgctctgcccaggcctgccttccttaactgcacactgtgggcccttctcataaccaaactctgggttccattcctttgatcaaccctactgaattcatgaacacatcaggctaatatttcccttttctgtcctgtcgtcttggcaaaatatttgaacaagagggattagggttgaacatggtaaaagatcaattctcatggttagatttcaaggccagaaagaccctgaaaacctttcagaattgtggtacccgacgacaccaccagtgcactggaagagctccctctatcacacagagcaaatgacagaagaagcaaccctttcaatcaaaagacagcagcagtgaatagcatttccacagatgaagaagatgtggaacagaacttaaatcccttccaatggtttcctcgatgctcaagcttttcttatcagggaaggcagggtaaattcttgttctcccccatactccatatttttcttttttcatttctttgtaatacaatatttgatacatttgaagatgccatatctttagttaaaaaaagaggctttgtttgattctaatatttatcaaattagtaaactcttttagcatcttatcatctagtcaaaatgcctttagagtgatgtcttagatctgagtctgtgttaaagtaatgttttaactttttggagcctctgttcatctgctcaacaggtataacaattcctgtttcaggacttactacaataaaaacatggtaaaatacagttatgatgagattactagcattttaatgaaaaaagcagtggtaaacttagaaataggaaatttttccatagtaataaaaactctagatgttattatgaacacgtttagaaataatagttaataaaacatgtatttttctaaaatgaaggctttttcccttacacaggcttttttgtttttttttttttgatggagtcttgctctattacccaggctagactgcaatggtatgacctcagctcactgcaacctctgcctcctaggttcaagtgattctccttcctcagcctcccgagtagctgggactacaggcacatgccatcacactcggctaatttttgtatttttagtagagacagggtttcaccatgttggccaggttagtctcgaactcgtgacctcaagtgatctgcccgactcggcctcccaaagtgcatatgctgagtcattgccatctacatgtcttcgctttgctggtgttgtttctgccacctggaattcttttttctatttccaattccttctcaactctgtgccctaaggatcccactcaaatagtgtaaatattattaattcctcaaaactcagttctgtcagattccccatcttatttttcttattgtacttataccttgcttgtcaaactttatattcttatatattttcaaacacaaatatgctttttcatgctgtggtctttctgtctacagagcatgccatcattcttgttccttctacaaatcacttactaatcctaaaagccaaattctgaagactttctcaataagttcttgcacaaaggtaaggcacttctttctttttcttcttcttttttttggttgttctctcaccattgttttacatccctgtggttggcagaattatggcctcatgatgtccaagaactagtccccaagaactatgaagatgttaacttacatactaaaagggactttgcgtatgtgattaccttaaggatcttgaaatggggagattatactagataatcctggtaggcagaatgtattcctaaaggttgtaaactgaaagagagaggtgggaggctgagtgtcagggcaatgcagtatgagaagactcggccgccatggctggctttgaagatggaaaggagtcatgaggcaggagtgcgggcagcctggagaggatgggaaaggcaagacggattctcccctagagtctccagaaagaaacacgggcctgccaagaacttcattttaccctagtgaaagtcattcagacttctgacctccaaaacgataaggtaataaatgtgtgttgtttccaaccattaagtctatggtaattgattccagtagccataggaagccaatacaatcactccactctaacactaggtatttttttaacttgggtttgcatgttgctttatgttagatttctttaaaaagaatcccacatcacactaagactcttatttatttatgagttttctctggagcaaaaatcaggaaagtgagacctgcagcctgagctgccataggtgcattactcgtttcaattatttgctttgtcctcggaagacaagaaaacgaaaaagagagacagataagacaaaaatagaaacgtaaacaaaagtaagcacctctttcagttttattatatcagtcagaagtacttcaggtaaaatgggaagaatgccaacatgtttttgagcatgtactaggtaaaatggtcattagagaaactgtgaatttggatacatggcccagatgccccttcaatgatggactttgcccagtttgctcagagtactgtcagcagaacaccccctgtggccagctcctcagggatggcttcagctgtagacgattatcttgctgtgatcacacccttcccagcccacatccaaagagacatgactttccatctcgactcaactcaggacaaccctaaaggaacgttctagccttagcactgcccctggaattggctgaggctttctttgaaagtgaaacacagctcaacttcttctgctcgggcttactgtctttctctccgtccgtccatagatgtgaatctcaggggcatcccataataaatatcctacacactaaatacctcctgaggggctgtttccgagggactctaacctatgacactatttttagaagtgtagaagaaaacacaagtgtagaaaggttaatttactctccctcagccacgtttaatgatcagtctttttaaccccagagtccacattctttctaacatactgagcttctcacactgggctatgtatcaagtcaaagttacaggatagatgtccctggagagtcaattttacccaattaccagaaatttaacacactctctcagattcaaaagttcatagtagagtgcgaaattcaatgagcttttaagaaaaagcatgatctttcaaaaaaatagtcttttatttattacaggcagctacagtatagattgccgtcaggctgcttggctttgaatccatgttttgctggttactacctgtgtggccttatgcaatttgctttctcttttgggcctcagcctctccacctaaaaatcaggttataaaagtacacattccatgagaatattgagaagaacaaaattatatcattcatgtaaacttcttagaacaacatttggtacatcttaagtgctcagtaagtgcttacaatcttatcaaagcccatcaaagcccattccctttcctctgtgtttagagtacttaattaactaattaactaatgcatctaaaaggattgcacaatgttaacataacgcacctcctctgtgcctcgattttaatttaaaactttatgctaataattttctgtctcctccaacgcaccccgctattctaaaaaccagcttgaatttaataataataatacataaaccctcaatattctcttatctcctaatgaatcaagtccaaacactgcaggctgctttccaatgccctttatgatctgaccctcatccagttttccagtcttttttctgaatttgccctgacaaagtggactactctagtccctgccccctcctttctttctgcaaaagtgcatttgctcaggttggttgccaaggttggaaagtccctgtccatctgctattgatcacctttaaggtcctctcagtctcagtttcttcatgaagccctccctgtcccctgcagcctgcctctgtctccacctccgctagcatgcattatctgggacagtcacttattgcagttgatccttttggtcaagtataacttgtacacacaggcataacttggagatgctgtgagtttgtttctagaccctggcaataaagcaaatatagcaacagaacaagtcagacaaactttttgatttccactgcataaaatgttatgttcatagtatactgtagtttattgtgtgtaatagcattatctctaaggaagagatgcacataccttagttcaaaaacactttaatactaaaaaatggtgacacagagacatgaagtgagtacatactgttggaaaaatggcactgatagactcgttcaatgcagggttgccacaaatcttcaattggtaaaatacataatatctgcaaagcacaataaaatgaggtatgtctggacaaacagactgtgagtgccctaagaacagggagtctctgttttctgtcttttcataacaagtactaagataaaaaaaaacttatagacattcaataattatttcttttgaatgttagtatttacataatcatcattttttgatattgtttgttctagttgagaaaaagtgtcagatataatttgaaaaaaatatgaagaaggaaaatttggtctcttctctgtagacaatgaaatccctgattttatgtagaaacatgtagagtctactgtgttggcttaatgtttgaatacacgcttaccatagaagaactcagataggaaaagtttaggaaaagtatgacccatcttttattgaaatgtacactttaattctgtgaaaatatttcaatgtaaaagaaatgatgcaagtaaatctgcatccattcaacaataaaatctctttttagggcattacaaaaggtaatgaggtcaagcaaggtaacatgtgagtttgtatatagtttcaggataaggagacaacagaaaataacaacaaaaaaaaaaaaccctggctcaagtctgtaatcccagcactttgggaggccgaggtgtgtggatcacgaggtcagaagttcgagaccagcctggccaacatagtgaaaccctgtctctactaaaaatactaaaaatttgcgaggtgtggtggtgtgcgcctgtaatcccagctactcgggaggctgaggcaggagaatcgtgtgaacccgggaggctgaggttgcagtgagctgagatcgtgccactgcactccagcctgggcgacagtgcgagacaccgtctcaaaaaaaaaaaaaaaaaaacccaaaaaacaaacaaaaacaaaagttaaacaaaatctaggctgccctgggctgaggatcttagaaactactttgatcagaagaaggacaaaaggagcttctgtattatttgttcggtgaatagtttgatctgaaatgaaaaagagcttaggccacgtaagattccagtgagaggtgatgaattggctagctttgggaataatcagtactgtgcattacaaataggaggggttagttacatctacacatcccagaacttttatactcctggaagatggcaggacaggcttatggctattctttgactttagctattctgttttgggggctctgtagtgaagattatctctaatcatcaacttgctgcttcagaaatgtgattttcaatcagggttcctagggtgctgagagctcctggatgtgtgagctgtacttaacggcaaagatctgaggtcagagttgctatcttcctatgtgtctcccgcccttgccttcctgccagcatctcttcaccttgtcgtgctttcagagcaggaactgacgcaaattgggtgttggactcccaagaaacgtgtcacagctatttagaaagtgataataatcctaatgccctgtaatgatttgaggattaaggaataaaactgcaaatatgatgcatggcatataaatgttgaaagtaggtgcttaaatggagacaaaatctgtgaaggagaccaactcatttggcattttcatattcttactatgtttagttcatatctatataacatagagaagtgtggatcctgcaaactaagacatggaggggaatttctttatacctgcaagaaaaaaaaattataaaagacattgaaactgaccaaaaagattactaggtgttgtgcagaatcctcaagatagctcccccaacattcaggtttcctagttatttgatcaagcattaattcaggtactccctaggaagacattttgcagacgtgaagtcctaagtcagttgaccctaaaatacagagattatctacataaacttaatctaataaaaccagcccttaaaagtggagaacagagaacttcgtccactggtggcagggggagaaacagaaagatccaaagcaagagaaggactcaaagctccattgctggtttgcagatagagaagattaagtgagaagtaataagggtggtctctaggagtggagagtgaccattgaccaatagtcagcaaggaaatggggaacctcagtcctacaaccacatggaactgaattctgccagtaacctgaatgagcttggaaggagattcttccccagagattccaggcagtagcccagcccagcaacaccttgattttggccttatgaaacccagtggtaaaggcagctgagataagctagacacttgatctacacttgatcataaatgggtattgttttaagccactaactttatggttatttgttacactgtaatagaaaactaatacacttggtgttttcaatggaccactaggctttgtttaaccacagccatcacagtttcttttttttttttgagatggagtctcactctgtcacccaggctggagtacagtggcatgatcttggctcactgcaacctccacctcccaggttcaagcaattctctacctcagcctcctgagtagctgggattacaggcacccaccaccatgcccagctagttttttttttttgtatttttagtagagatggggtttcaccatcttggccaggctggtcttgaactcctggcctggtgatccacccaccttggtctcccaaagtgctgcgattacaggcgtgagccaccgcgccaggcccagagttcttattctgtgaagtctctgtgcctttaactccccttgagtgagtgtacagctctgtaagttgtagataactgataacaatacaaatatttttgtctatagatacacacatgaattttatccttcagaaatacaacccccttctgccccatgcaataaaccagtattatatttgtcagttcacgttggcattactaatctgccaatatgtgagtggtactttaaatccttctttgaaccagttgtaacatccataccatgctaaagagttaaataaaatccttgatgtacttattttatatctgtataagagtcattattttacccttttataaaacatatcatttaatagagatacattcagagatttctaaaatttacagggcaaggactgtttattcatcccagagtttatgtcaaaaaaagagctaaatattgtacataagctcatctattcctcatgctaaacccctgaccctggtatgaagagtccctaattgaaataaagaaaccaaaactcaggcacatcacaaaacatactgtagagcacacagtgctggagtcttggagctgagaatttggcatactggaatataaagctactactacttccgttgttccatagagctttccaatgtaaaatggggctcatctcctttcaccctaacccagcatctcctccttatttcttcagtccattcttgatgtgaatattttcctcctcagtcaagtttgaaaacttagagccatttttgtcctttcatttccttttctttctatatccattggttatcaaatgccttaagttcagcatctaccatctcttgtagcctcttcctctttctgtttctgctactatcatctgagtttcttctcacactaatagcagctcaaataggcaaacaggaccagatctgagttttgggagtttggcacttttacaattttagagggccatctttagggaaaaaaaaaaatagtaatatgaatacaaaatgaaacatttattcagaatgagaaaataagccacaagaaatcaacaatcttagaacttcttatttctttgttttgagatctctgatggcaatttaccagaaatttttacatacaggtgattcctgactgtaactcaaaacccttccccgctctaaactccctgcaactccacctactcacaggggccatgcaaagaagtaaccctaatactcaggcttccgtagctttagaaacttagagtctctactatcaattctttttccatttttagtaaaggaaataaattaagcaatggaaggtctaacaaattattcagagtttcatggaggtggggagaggttacgaacctgggacgttttaaacactcagattcctgaattataacccaatattctaaataaaaacctgaggacatctgtatttttacaaggctccacaggtgaaatggatgcaactgacctatgaattacaaatttgaaaaccactgctctagctcaactgcatgaaaagtgacctgatcctctgtctccaaaggttaaagctttcagagtgcaacagagtcctccaatatttcctgggcactgtggtctgtacaatgcaaaattcagaagctataaaaaatggaggtgaaaagggccctgattaaagactgaaacagaagcaactgcttttctctctgtgcagctaccatactggtcttgattcaagtaaagcaatgtgcctgatgagaatcactgaagcacagaaaatggtctggtactgagagatgagcaaatgaatcccaagtatcaggagtacacaggaccagaaaagaagtatttccaatacccacgcctgactaaagatttcactagcctcttagctcaaagggacaatagataaacatcaggtctacactgcaaatttgcctgcatattaattataatttatttcttctatctttgtccttgcattagactgtttaattccgtgtatgaattcattttgaagtgtagagtccatcgttctcagtaattagctttacaaagtctatcatcgaaaatattgttttagattctttgaatacagattctatgaaagagaaaaatccttaaaagtgggagactcggccgggcgcagtggctcacgcctgtaaccccatcactttgggaggctgaggcgggaggatcacgaggtcacgagatcgagaccatcttggctaacacagtgaaaccccgtctctactaaaaatacaaaaaattagccaggcgtggtggcgggcgcctatagtcccagctactcaggaggctgaggcaggagaatggggtgaacccgggaggcggagcttgcagtgagcagagatcacgccattgcactccagcctgggcgacagagcgagactcgtctcaaaaaaaagaaaaaaaaaagtggaagaccaataagaattattcagattctactggccagagcaggaagctcagctaccagcatttatctttagactcctaccacatatgattgccccaactgaaacacaggtcagagagtctgctgtacttctaaagtgatgagaacaaatcttcctgtcactttatgtcacagtcatacagttcccgaatagcaacccatagatagagcccttggcaaatttgttatcagcggtgtgtgtttacacacatcaagtgtctgggaaataaagaaaaaaaggaaaatattgacagtgtagaggatgttctttcttctggaaactcataagattttgaaacacagctgaatattttgaacatacctttatgttcaaaataaattaggaaatgattcaatactaagcataattgaagtcatagaaaagcattttttattcttttgctctattaagacacatttcattgtttctcatggttactgagtggtacatcgctgtatatacatatttatataagtatattagatgtaccttttgtgtgtgtatgtatatgtatatatatgtggggggcatatatttatatatatttatagcaacatatactgtatacttctacacactttgctctccgtcctgggaggtggaccagaagggttaaaaagtgcctgtgtcctctggcttccggttgggctcagcctagggagtgcctggcctgagctggagggaggtgaggtattcaagatccctccctgaggcttggctgcaactgggtagggtacactccttgaccaaaggctacagttccattccttggacctatctacccgatgcccccacccccaaacctgggttccaataacttccctcttcactccttcagttctcggggaggcccagtttgcactgctgttgccagccagagagaccgtagctttccttatggtttccctacaacctttgtaaatagttcctttattaaactcttttcaaattacccaatttgtgtgatccgtatcttcctgacttggaccctgatatttttactgaatattgactagtaagtgtattgctcatgaactgaactgcttcagagttgttgagctcctaacacataatttattatttttctttattatcaaagtttttaaaaatgtatttactcctaatttctttcaaaaatagatttatgacaggaattattttgatgttatattccaggccattaaaagcatcaagtactttggccaggcgcggtggctcacacctgttatcccatcactttgggaggccaaggtgggtggatctctttaggttaggagttcgagaccagcctgaccaacatggtgaaaccctgtctctactaaaaatacaaaaattagccgagcatggtggcagatgcctgtaatcccagctacttgggaggctgatgtgggagaattgcttgaacctgggaagcagatgttgcagtgagccaagatcacgccactacactccagcctggacaacaaaagtgaaactccgtctcaaaaaaaaaaaaaaaaaaaaagaaaaaaagttcaagtactttgggaataatagtaagaggaattaaaaaaatcaagtactatttttatgaattctgggcattttcccctccaaatcatagaccaaagactactcaatgaatactcagtgaatctcttcatgttatgaaaatcaggaaactgctgcctaatggcttaacctttgatgtaatgattttcgctcagtagcttaaatctatgacaatgttcatatttattgaattctactctttgcctttaggctaaggaactatatgctttatgacattgtatattataaagaacaatctataccaaaataacaaccttcagagaacaaaaaacagaggatgctggagtcagcaattgctaagatactggacagacagcaaggtgagtaatggagttaataatctggaatatggaatactgacactactaaaaccatatttgggtgactaaattaacgccacacttctcatccacctacataatgtttacgcatccaatgatgatagttacgtttatccaatgtcaaggcatgcttacaccgttctgacatataatacctttaccaaatgctaattattttattaatttaaaaaatatttaaatataagaagtgaaattccactgtcaagatgcattattcattgtttttcctgtatcagttcaaaaaatattattcttaaaaaagaactggaccaaattccaactgtgatactacagaagaaaaaaaaaaaagctgaagtaaacaacattaagaaaggccaagtaaagtgacaaatcacagcaaataacaatttatccctactgaaaaggacagcacaattcaatttgccaaatcattttatttatctctgagtggcaatatgaatgatcaatctgttttgatgaacactaaaactttgctgaatgaaaaactgtgctgcctttaacatgtcaaatttaggtacagtaaaagaaaatgtgaattaaattggctttgagtatacagcattaaaagataaattgctagcttagaaatatctttcccagtagctttatttgaaccaaaatattttgcttaggaggaattacataagtgtgcaatctatataataattatttcttggtccctaaatttgaaatgttctcaaaagcctaaatgcagaaaaaggctaagaagattatatgaagagaaagatctggtttgatcaaagactttggctgtgaattagagagggttttatagttttgggataaacaatttagcaaaaccctgatattctttcttccttcatgcatttatgcatttaactgtttgttaaaatactcctatgtgcaaagtttgtcctaggaagtgggaattaaatattgaaaactctctgttttcaatagctccaaaaaccacataactggagctttaggacccatcttgtggctcctggaaaatgaattttaaattgaatcctgagagattagtaggagttatctaggtgaacagagaagggtctcaagtgaaaaagcttccagggagacagcaatgtctgcagaagtctagaatgagaagacgcaggaccattctaggagttccgagaagttgatttggtgaaagcaaatatgttaagttttgaaaaaggacatggttgacataaggcgagaccagaaaaaaaatttagaatgttgaggtgaaaaaattatactgtattagtaattagtcccagaatccctgttaggaaggaagctttggttacgaacatatcctaacttttagtccagaggcaagactaaggagagtataatgaagtaaagaaaagaggacgatgagttgctctgcattggaaatgaacagggatctatggtttggggacactggaaaaatgagaaaaggggaaataaaaaagcaggaataaaattataaagggaggacaaaggaattataaaaacatggattttaagttatttgtttcactgtgttggaaatgtccttttataacaccctaataatattcagtactagctaccacaaagacaaaagagagaaatgcatttgtagtgttttgtttttatttgtggaaatacaagttctatatctgttgtcatatcagggcaatgatagaattgcctgtcacggtcagtacgtagagtcaaatgttattcagcaaagagaggatgactctagcacttgcagaccccttggagatggtatgagacttttcacagggcagtgtgcagggattggagccaatcttctagttcaaaggagcatggagttccagcaaacacatagggtatgtagaactccagaaagtttgagactgatttaaggataatgggagtgttaatgagggtaatgcttggctccatttgtcatctggatacactgtaccaatggctgagagggaggcaggactgaggcagagaggccagttaggaaagcaagtatgttgggtcacttgcaaagccaccattgattctgatgttctgggatggctcccctgactgtgatctcagttcacctggttccaacctggggacacagaccaagtacttagaccttagtcaaagacattacccctgtcttagaggagggagtgatagagttgggtgattatgtgtgtgtttgcatgtatgcattggaggagtttataagcataaagggagcaagaaatatcaacatggctcaagtggttattcctctaagaccatttgtgagtataaaattgtgtgtgtggttacccacacaataagaaattgatgagaacttaattgaatcaaattagaaatttactagccccacattctgtaattctgccctggcagaaaaatggacctaaattcagactatcggtcttaatatgcatctaatgaagaagtttgaaataaaggcaatctgctgacttgggtgctttgaaaaaagaaaggactcaagttggccattatttcttgttaatcaacacagtagttaatgaatataaaatttacatccttgttacagtaacatttaagttacatctttcaacccattttgtatcttgttatcactcagttttgtttctgtctaaaaatctacttgctagaagggaaaaagagcctttctataatattagaagatttatttaaatagttctaaggactatggactgtaaacttaaaattaataatgtttgccaaaggaaatacctgtgttagaagacttgtgaaagaaacctttgttctttcacacaagagttaagtgtagcttgtcataggaggtggattttagccataaatcctagtgacactgatatcatcaatcgagtcctaagtaactctacctgtataagaaaatcatgattttattaaaattacaatggtaactaatgacttccacagtttcccacaatcacatcaggcctttacctcccttagtctacttgggctgccattaactaaataccatagaatggatgtcttcaacaaaagacaattttttttttttttttttttttttttttgctgttctggagcctgagaagcccaacatctgagtgctagcatgggtgagatctggtgtggcctctcctgctttgcagatggctgtcttctctctgtgtcctcacacggtgatgagatagagagcaagctctttggtttatagggggaccaatcttgtacaagggacccacctccatgagcccatctaaaacaaattatctcccaaaggcctcatctatcatcacattgaggattagggcttcagcatattaattttgaggggcacgattcagtccacagccctccctctgtgcttgtatcactgctttttcttccttgctgtgaatgaactgaatggtatgggcttttatctaaggacaccctctagccttgtgcataggctctgaaaagttctccttgcacagggacaacattgtcgggacttagccctttttctcctccatgctcaaatttcacttttctgttagatcagttccaacagcctgcacaatactgtaaatacttctatattgaagattaatataaaaacaaaataggctgggtgcggtggctcatgcctataatcctagcagttttggaggcagagatgggcagatcacttgaggtcagcagttcgagaccagcctgaccaacatggtgaaaacttgtctctactaaaaatacaaaaattagccaggcatggtggcacatgcctgtaatcccagctacttgggaggctgaggcaggagaattgcttgaacctgggaggcagaggttgcagtgagcccagatagcaccactgcactccagcctggatgacaaagctagactccgtttcaaaataaataaataaaataaaatttaggaaactgttgaccctacatccccttctaacttactgtctaatttcttcacttttcattagagccactcatctaatgtgtctatattcactatctctaacttcttttcttccattctctcattttttaaaaataaataagatcattatacaaaactcaaacaacataggaaagcaaaggaagtcttgcttctatcactgccccaccaaactcataatacaagccattttttttttttggtttctaatttctaattctttccacttttctaatgcagacatcaatatactgtataggcttgtctgcagtttgtttgtttttactcagatatacccaggagattttcccactgtcattatttaaagaatgagtccccaatccccaggccacagactgacaggtcctggtccgtggcctgttaggaactgggctgcacaggtggaaatgagcaaaagccagcggtgattattatcacctgagctccgcctcttgtcagatgagccgcggcattagattctcatacaagagcgaagcctattgtgaactacgcatgcgtgggatctatgttgggtattccctgatgatctgaggtcgaacagtttcctctcgaaacaatccccaccccccaaccctgtctgtggaaaaattgtcttttccacaaaactggtccctggtgccaaaagggttggggaccactaatttaaagaagttcttcattctttaattttacaatggctgtgaatggtcatcattgattcaactattccttacttgctggacattgggttgttgccattacaaacaatatcctaattaactccttaaacacatggcatttgatatttgcacaggtgtatgcacaggctagactcctagtagtagaattgttggctcaaagggtaaatacatctataatttatttcatacaatactgccaaatttccttccgtaggagttgcaccattttcaaatgtcacaaagcaacatataaaagtatttattttcctgaaaccttgccagctgagtgtattttcatattttgtatagatagatgacaaaaattgtattttcagtgttattttaatttgcatttctattatgaatgacattgagcactttttctatgtggttaaagggcattagtatttctttgttaattctctctctgtccctctctctctctctctctttatatatatacatatatatgtgtatatttatatatatatgtgtgtgtgtatatatatatatatatatatatatatgctttacttgcttttctatgaattgttggttcttctcaatttcttatagctctctatatactaaacaaattatcccattgtctggacaacaacatgcaaatcataaatccatctatattttgcttatcttgaatctggcttcctagaacctttggaattctgggaaaaccccagattcaaaaagagcttagaaacacatattttaccacctcttgggagctaaaagtacagctccttgagcactcagtcatgtaaacatgactacaaaaagccaaaggtacaaaatcacacatcatgagttctttcatcaggtatatccactcagtacccaccatgggtggtcaggtagtgctctaagtatcagagacttacagccaaacacccacaccgtaactcaaggatttacactggtcaccaaattgaagggccagttagtagttaaaaaaaaaatggaaaaaaaaggtaagaaatacattgactggcttgcagtacaaaaaaaagaaattatcctattgctgtgatgatgaattgcatcatctccattattcttcgaatttattgcaatcaagttgtttgcccttatatatactaaaattttctttgtcaagatcaaacatgacttctatgtagccaattctaatatcaattctcagttcaccactaagtgataaatggtttacatgatggataccccagttacccagattggatcatcacacattgtatgcttgtatcaagatatcacataaatgacacaaatatgtataactattatgtattcataaaaataaaatattaaaaactaaatcccccacagaaacttaaggtaaaacgattcccagagtatatgctgaatggtcattatttattgtatcttcaacccatttctgaatcatgcccagctcttatgttatagcacattttcattgcacaacccctgtgtcatcctctattgctaggattctcatttcattcatgttggaacagtgacctaaagagcttaaatgtgccattatcagatctgcaatggagatgaacacttgcctatgcaacatccatctttgtttataataaaccaccatttatattaaaagtgataatcttcccaattaaatattccatatttcccaatatgatacagctgaatctagtcctctgggaaaatttaatctatggtatgttagaagtgatgtgtgggactttaccaaagctctttaaatggaactccttcagctgagagtcatgccctccttgacttttcctctttttgtctttctgctacctggaatgtaagcataatggctggagctccaacagctgtgtttgaccatgagctgaacttgtgagtaaaagctatgttctaggacaggggtttccaaactttctgtaaccgacaaaataaatattttaggctttatagcccacacttgctctctttcatatttttctatttttgcttgatcttctttttatatactcctttaaaaagaaaaataaaatttttaattttgcagtccctacaaatgcagtctgggccagatatgcctgtgagtcctaatttactgagtcaccttactgtaggatggtgggagagaaagattagagagtgcctcatgacagcagagctggcatgccagccctattttgcgtacctccagacttcctttatgagagagaaattaatatccatcggtttaagctactgttactttgtgttttctattatgtgcagataaatgaatcctaactgataaatggccttcgaaggaaatgtacatattgcctctgccaaggaaccttagaagacattattttaaggagaaatactataaatacaaaagcatgtaaataggagaaaatttcaagggcatatttacaagagaaggttgaagtgaagaatcttctctggagggtatggaaagacgttttgataaatattattccattgatatgtcaggtgaagctagttgattgcagtcctgggagtgaggaggagcagtttgaacttgattcattagttaataaagagctattggacgttcttaatcctagtgagggcataagaaagccatcattcggaaggagtcacttgtcagtaatatagtctggactggaacacggaagctctatgctggtgatcctggagggctgaatctcaaaagtttgaaatgacaatagaaagaaaaagttgattctgagagatgttaccaggtaggggcagaatgagtggactagcatttgttagataaatgcatgtaaacgttggcagaggagggaagagttggctatatctgcaggtaataaatttctgctcttataatgtttataactatttttgctcccttgcttatctatctattattttctatattgtacacttatttcaacagaacaattcatgcttcaaccctcgaaaaattgtcattggacacaactttataccacttagctgagtttcctaatctctttcaataaataggtaagcacagaaccccagttgtagctaaagattcttgaatttattcaggtcaatatattgattaagtaataataataataactcacaatttttaagagcatggtatttgacagatgttacagactacatagattctgtgttgtcttcataagaatcctattagatggcagctgtacacagtcagcttcaccttcaatattgtgaaacggttgcttggaagaagctgtctagccaggaactgcatttccctgtatccacaccattttggtgaatgctcatgactggattttaccaatgaatgtgaacaggaatgttgttaatagcttcagggctaaaatggttatgaaagtgcaagagatgctctaaactgtctttctctgctcaaagagattctaggggatcatgaaacaattatttggagacacccaggatcccagagtcaatgcacggaaagagctatgcatgagagccacctaacacatgtaaaactgtgacatacatgagaaatatacattaattcccttaagccactgagatttttgagccaaggctggcctactgtaactaacacagtaggtgttattaacattaccatttatacaaacagaaataagacttgggaagatctgcctaagacactaagtaatagagctgtgattagcatttgaaatattcaatttcagagcccatgttcttaaccattgcccaatatcatcatctttttatataaatttgtaaaagtggtgatactgttttttttaataaactaggaagaaattctaaactcctatattttgaggtgtgttgttcatgttcacaaagccccatagccaactaataaggtaatatgcattactaatgggtaatatgcattctacattaaaaatggcatttgctttaaggaattcaatgatctaggatttaaatattttgttccaagtttaactgataattccccccaagcttttctcattggcacaataatatggcttaggggaaagtatgaaggctgagtaatcagaactgcttggatcagaacatgacctcttcggccttgagtaagacatgtaacctcgctgaggcttcgttttactctctgcaaaagacagttaacatcaccagctttttaggataattctaaatattagaaataatgctggaaatcttaataaatcactcagtacacatagacagtaatttaattcaatcaagaactatgtatttaaatgtctactataatgcatgccagacattgttgaggctccaaagatacaataaacaaaacagacaaaaatcctcacctatttgcattcaatgtattcttttttttttttctttctaacagttcataataaaagaaaccaatattaaggcactttcaattctgatcaagatggagtaacagggacaagatttacattcccatccgaaacaacaacaaccaaacaggcaaaatatattagacaatagtttaggaaacactggccattaggtaaaatagatagtgatctcggagatacctggaatgaatgagatgagccctacaattgcccaagcaattatgagacaaggaagaatgcaaaatgagattggaaaatattttaaataaaaaataaaaacacatgatatcaaaatagcaggattctactaatgcaatatgtacacagaaattgaatcactaaatatctatgttcgatagcaaaaaagatatcaaatcaatagccttaacttctaccttaacaataacatttaattagaaaaagaagagtaaattaaatcccctgtaagcaaaaggtaatgatattaatcagagcagaaaacagtaaaatagaaacagaaaacaatagaaaaaataaatgaaaccaaaatgtagttcttttaaaaaagtcaatacaatcaataaacctctagccaggctaatcagaaaaaaagagagaaaatacaaattatcagcatcaagaaagaagggacataactacaaatttttctgatagtagagaataatatagaaacattgtgaaaaaaaaacacgcatgtgaaatgaacaattttcatgaaagataaaaacaaccaaattttactcaggaagaaataggtactctaaataaccctgtatctgttaaacacattaaagttacagttaaaaaatttctcacaaggaatgttctaggcccagatggttttgccttcgattctaccaaacatacaacggggagattatacaaattcaaagcaaattcttcctgaagacaaaagaaggaagacttccacaaatattctatgagccagcattaccccagtatcaaagccagggaaaggcgttacaaataaaaaaaaatacagagtaatatctctgatgaccattggtgcaaaatttctaaagaaaatgccagcaaatcaaatctaacagtgtataaaatgataatgcattatgatcaagtggggcttatctcaggaatgcagttagtttaactttagaaaatcagtgtctgtaatttacaatattaacaaactaaaaaagtgattatttcaatagatactgaaaaagaatttgacaaaactgcaatgtgaattcctgacaaacactctcagcaaatcaagaacaaaaggaaacttcctcagtgtgataaaaagcatcttttaaaaacttacagctaatttaatggttatatttaaaaaacttaatattttccctctaatatcatgattatgagaagttatctactcttacctgttcgaattgtatagtgcagattctagccagtgcaacaacaaaaaaaagaaatacagtattgagcatgaagaagatatatttatttaaagatgacagaactgtctatgtataaattccaatgaaatctacataaatatctaatagaaataattgcatgcagtgagactgcagcatacaatatcaatataaaaataacttccattaaattgaaattaaatattatttataatagcttcataaattgataacttagtaaagttatcaattttccccaaattgatttacagagtcaataaaatccaaaccaaactcacagcgggcattgtttatttggtagaaatcaacaagctgatttgaaattaatgtggaaatccaatgaatctagactagccagggaaattttaaaagaaaagaaagaacaaagttggaggaataacagtgccagaattcaagactgattataaagctacaattattaatatagtgtgtgtcattggtgtaataaaagacaagttaatcaatggaatagaaatggacccatgaatatgtagaatattgatttttaataatgctataggctaagcaatggaggaaaatatcgtatttttagaaaattatactaaagatatgtttgagggggaggagccaagatggccgaataggaacagctccggtctacagctcccagcgtgagcgacgcagaagacggtgatttctgcatttccatctgaggtaccgggttcatctcactagggagtgccagacagtgggcgcaggccagtgtgtgtgcgcaccgtgcgcgagccgaagcagggcgaggcattgcctcacctgggaagcgcaaggggtcagggagttccctttccgagtcaaagaaaggggtgacggacgcacctggaaaatcgggtcactcccacccgaatattgcgcttttcagaccggcttaagaaacggcgcaccacgagactatatcccacacctggctcggagggtcctacgcccacggaatctcgctgattgctagcacagcagtctgagatcaaactgcaaggcggcaacgaggctgggggaggggcgcccgccattgcccaggcttgcttaggtaaacaaagcagccgggaagctcgaactgggtggagcccaccacagctcaaggaggcctgcctgcctctgtaggctccacctctgggggcagggcacagacaaacaaaaagacagcagtaacctctgcagacttaagtgtccctgtctgacagctttgaagagagcagtggttctcccagcacgcagccggagatctgagaacgggcagactgcctcctcaagtgggtccctgactcctgacccccgagcagcctaactgggaggcaccccccagcaggggcacactgacacctcacacggcagggtattccaacagacctgcagctgagggtcctgtctgttagaaggaaaactaacaaccagaaaggacatctacaccgaaaacccatctgtacatcaccatcatcaaagaccaaaagtagataaaaccacaaagatggggaaaaaacagaacagaaaaactggaaactctaaaacgcagagcgcctctcctcctccaaaggaacgcagttcctcaccagcaacagaacaaagctggatggagaatgattttgatgagctgagagaagaaggcttcagacgatcaaattactctgagctacgggaggacattcaaaccaaaggcaaagaagttgaaaactttgaaaaaaatttagaagaatgtataactagaataaccaatacagagaagtgcttaaaggagctgatggagctgaaaaccaaggctcgagaactacgtgaagaatgcagaagcctcaggagccgatgtgatcaactggaagaaagggtatcagcaatggaagatgaaatgaatgaaatgaagcgagaagggaagtttagagaaaaaagaataaaaagaaatgagcaaagcctccaagaaatatgggactatgtgaaaagaccaaatctacgtctgattggtgtacctgaaagtgatgtggagaatggaaccaagttggaaaacactctgcaggatattatccaggagaacttccccaatctagcaaggcaggccaacgttcagattcaggaaatacagagaacgccacaaagatactcctcgagaagagcaactccaagacacataattgtcagattcaccaaagttgaaatgaaggaaaaaatgttaagggcagccagagagaaaggtcgggttaccctcaaaggaaagcccatcagactaacagcggatctctcggcagaaaccctacaagccagaagagagtgggggccaatattcaacattcttaaagaaaagaattttcaacccagaatttcatatccagccaaactaagcttcataagtgaaggagaaataaaatactttatagacaagcaaatgttgagagattttgtcaccaccaggcctgccctaaaagagctcctgaaggaagcgctaaacatggaaaggaacaaccggtaccagccgctgcaaaaccatgccaaaatgtaaagaccatcgagactaggaagaaactgcatcaactaatgagcaaaatcaccagctaacatcataatgacaggatcaaattcacacataacaatattaactttaaatataaatggactaaattctgcaattaaaagacacagactggcaagttggataaagagtcaagacccatcagtgtgctgtattcaggaaacccatctcacgtgcagagacacacataggctcaaaataaaaggatggaggaagatctaccaagccaatggaaaacaaaaaaaggcaggggttgcaatcctagtctctgataaaacagactttaaaccaacaaagatcaaaagagacaaagaaggccattacataatggtaaagggatcaattcaacaagaggagctaactatcctaaatatttatgcacccaatacaggagcacccagattcataaagcaagtcctcagtgacctacaaagagacttagactcccacacattaataatgggagactttaacaccccactgtcaacattagacagatcaacgagacagaaagtcaacaaggatacccaggaattgaactcagctctgcaccaagcagacctaatagacatctacagaactctccaccccaaatcaacagaatatacatttttttcagcaccacaccacacctattccaaaattgaccacatagttggaagtaaagctctcctcagcaaatgtaaaagaacagaaattataacaaactatctctcagaccacagtgcaatcaaactagaactcaggattaagaatctcactcaaagccgctcaactacatggaaactgaacaacctgctcctgaatgactactgggtacataacgaaatgaaggcagaaataaagatgttctttgaaaccaacgagaacaaagacaccacataccagaatctctgggacgcattcaaagcagtgtgtagagggaaatttatagcactaaatgcctacaagagaaagcaggaaagatccaaaattgacaccctaacatcacaattaaaagaactagaaaagcaagagcaaacacattcaaaagctagcagaaggcaagaaataactaaaatcagagcagaactgaaggaaatagagacacaaaaaacccttcaaaaaatcaatgaatccaggagctggttttttgaaaggatcaacaaaattgatagaccgctagcaagactaataaagaaaaaaagagagaagaatcaaatagacacaataaaaaatgataaaggggatatcaccaccgatcccacagaaatacaaactaccatcagagaatactacaaacacctctacgcaaataaactagaaaatctagaagaaatggatacattcctcgacacatacactctcccaagactaaaccaggaagaagttgaatctctgaatcgaccaataacaggctctgaaattgtggcaataatcaatagtttaccaaccaaaaagagtccaggaccagatggattcacagccgaattctaccagaggtacaaggaggaactggtaccattccttctgaaactattccaatcaatagaaaaagagggaatcctccctaactcattttatgaggccagcatcattctgataccaaagccgggcagagacacaaccaaaaaagagaattttagaccaatatccttgatgaacattgatgcaaaaatcctcaataaaatactggcaaaccgaatccagcagcacatcaaaaagcttatccaccatgatcaagtgggcttcatccctgggatgcaaggctggttcaatatacgcaaatcaataaatgtaatccagcatataaacagagccaaagacaaaaaccacatgattatctcaatagatgcagaaaaagcctttgacaaaattcaacaacccttcatgctaaaaactctcaataaactaggtattgatgggacgtatttcaaaataataagagctatctatgacaaacccacagccaatatcatactgaatgggcaaaaactggaagcattccctttgaaaaccggcacaagacagggatgccctctctcaccgctcctattcaacatagttttggaagttctggccagggcaatcaggcaggagaaggaaataaagggtattcaattaggaaaagaggaagtcaaattgtccctgtttgcagacgacatgattgtttatctagaaaaccccatcgtctcagcccaaaatctccttaagctgataagcaacttcagcaaagtctcaggatacaaaatcaatgtacaaaaatcacaagcattcttatacaccaacaacagacaaacagagagccaaatcatgggtgaactcccattcacaattgcttcaaagagaataaaatacctaggaatccaacttacaagggatgtgaaggacctcttcaaggagaactacaaaccactgctcaaggaaataaaagaggagacaaacaaatggaagaacattccatgctcatgggtaggaagaatcaatatcgtgaaaatggccatactgcccaaggtaatttacagattcaatgccatccccatcaagctaccaatgactttcttcacagaattggaaaaaactactttaaagttcatatggaaccaaaaaagagccctcattgccaagtcaatcctaagccaaaagaacaaagctggaggcatcacactacctgacttcaaactatactacaaggctacagtaaccaaaacagcatggtactggtaccaaaacagagatatagatcaatggaacagaacagagccctcagaaataatgccgcatatctacaactatctgatctttgacaaacctgagaaaaacaagcaatggggaaaggattccctatttaataaatggtgctgggaaaactggctagccatatgtagaaagctgaaactggatcccttccttacaccttatacaaaaatcaattcaagatggattaaagatttaaacgttaaacctaaaaccataaaaaccctagaagaaaacctaggcattaccattcaggacataggcgtgggcaaggacttcatgtccaaaacaccaaaagcaatggcaacaaaagacaaaattgacaaatgggatctaattaaactaaagagcttctgcacagcaaaagaaactaccatcagagtgaacaggcaacctacaacatgggagaaaatttttgcaacctactcatctgacaaagggctaatatccagaatctacaatgaactcaaacaaatttacaagaaaaaaacaaacaaccccatcaaaaagtgggcgaaggacatgaacagacacttctcaaaagaagacatttatgcagccaaaaaacacatgaagaaatgctcatcatcactggccatcagagaaatgcaaatcaaaaccactatgagatatcatctcacaccagttagaatggcaatcattaaaaagtcaggaaacaacaggtgctggagaggatgcggagaaataggaacacttttacactgttggtgggactgtaaactagttcaaccattgtggaagtcagtgtggcgattcctcagggatctagaactagaaataccatttgacccagccatcccattactgggtatatacccaaatgagtataaatcatgctgctataaagacacatgcacacgtatgtttattgcggcactattcacaatagcaaagacttggaaccaacccaaatgtccaacaatgatagactggattaagaaaatgtggcacatatacaccatggaatactatgcagccataaaaaatgatgagttcatatcctttgtagggacatggatgaaattggaaaccatcattctcagtaaactatcgcaagaacaaaaaaccaaacaccgcatattctcactcataggtgggaattgaacaatgagatcacatggacacaggaaggggaatatcacactctggggactgtggtggggtcgggggaggggggagggatagcattgggagatatacctaatgctagatgacacattagtgggtgcagcgcaccagcatggcacatgtatacatatgtaactaacctgcacaatgtgcacatgtaccctaaaacttagagtataataaaaaaaaaaaaaaaaaaaaaatcatatgtttgaaagcatcaaaaaaaaaaaaaaaaaaaaaaaaaagaaaattatactaaaaattaggtattcaaatgaaaattatttaattcatacctcacaccatgtacaaaaattaactcaaaatgcatcatagatctaaatataaaatgatacaacttctagaaaacaaggaaaaaaatcttagtactcttggattaggcaaaggttttctagatatgagaccaaaaacataatccataaaaaaattaagtgggactccattaaatttgaaaattctggtcttttaaagacactgacaggaaaatatagttatatagctaatatgggggagggagtggtatggattgaatgtttgtgtcctctctaaaattcatgttaaaactaaatttccaatgcagcagcattaagaggtgcggcctttaagagatgacttggccatgctggctctgccttcatcaataaattcctgccttagaaaagtcttgagagcgtgagtttacctctactgtcccttccaccttgggaggacacagtatttattcctctggagcatgcaggaacagggcaccatcttggaagcagaaaacagcccttaccagacactgaacctgcagacaccttgatcttagacttttcaacctccagaactgtgagcaatatatttatgctatttataaattacccagtctaaggttttttgttatagcatcacaaatgaactaagacaggaagaggagaaaacttgtacttagaatatgtgaagtgctctcaaaactgaataataagaaaataaacaacctatttaaagaatggacaagagtttgagcagacacttccaccaacaaagatgtacaaagggcaaataagcacaaagaaagatactccatatattagtcatgaagaaaatgcaaattcaaccataatgagatactgttacactcctggtaaactgactaagttaatattctgatcataccaagtatggtgaggaggtggagtgacaggaatgctcacaagtgctagtggtaaagtagtttatctgtcttctaaaaagttaaacatgcacctacaatatgacccatttatcttactcctagggatttactcaagagaacagaaagcatatagacatacaaaggcttgtccacaaatattcataacagcattattcataatagccccaaagtggaacaacccaaatgcccaacaagaagtgagtggatggcctggtgcggtggctcacgcctgtaaacccagcactttgggaggccaaggcgggcggatcacttgaggtcaggagttcaaaaccagccttgccaacatggcaaaaccccgtctctgctaaaaatacaaaaattagccgggtgtagtggcaggtgcctctaatcccagctacttgggaggctgaggcaagagaatcgcttgaacctgggaggtggaggttgcagtgagctgagatcacgccattgcactccagcctgggggacagagctacactccatctcaaaaaaaaaaaaaaaaaaaaaaaaaagaagtgagtggatggatggatggataagcaaactgttgtacatttctataatggtatactatttagcattaaagtggaatgaaatattgatgtgcacagcaaaacatctcaaaataattatatataagaagccagataaaagggtacacattgtgtgatcctatttatgtaaaattgtcaaaacagaaaaaaacccacaacacctcatgtagaaaacagacccatgttttcctggggaaggtggtgaggagggctgggagaaacaagagaaagttccagggatgatagatatatatgttcactactttgattagaattattttacgagtctatacatataccaaaacttagatactttaaatatgtacaatttgttgtatgtcaagtatagcttactttaaaaatgtaaaactataagacaaaaagaattatcatttagaattttttactgaatcaaaatattttgcagatgcatcgaattctctgcttcctatcatttagtcaaccatttgcagaggcctagagatagttttggcatggaatagatagtgtcttttcatttagcatggctaacatttaacttaaaaattgtaaagatactaacagattagaagttaaatgcttattcgctgataacatcttcaacattgagattcaaagcattgtgccccttaaagattagttcaccactggccatcagtagccacttttatttaattatatttataaaatttaaatgaatcaatgctcttgcctaagaaaattatacccaggagtacagaatgaaaaatgaaagtcctcctgctcatttttcatttctaagtacttcttcacgattaacaatgagagcaaggttgacaaagatgatgaactgccatttctaatccttcctggcaattgcattcacttattttcttttgtgaacaggaaagtacttggagagaaattatacagtgattcatggttctggggaaggctgctgatattttgatcaggccacctcagtgccctcaggaaatcaaagtgtcctatcactctgtatccattatcattacaaagatggtctgcttttaaaccatcttgatttccaggtagtaaatgattttttaaataaaaggtgtttctaaaagtattcatttgtactttttcttcatcaaaagagtattatttttattttaggaaagaacaactggagagaaagagagaaaggcttcttgcatccccattttatttgcttttaatcgttgcctttaccccaggcttcttggtaatgtgatggtgttaactaggagtccttatctctggggcaatgaccacaaaaggaaagtttagtagtagtgtcagggaaccacaagtttcagactttagtagctgtccatgaagattgtttagctctatccaacactttctgcaacttgatggccatagtttcctgagtctgagtctttagtgcaccaaaaagaagtatccatacctggaaaagtttctgttaggcacaggtatgcagattctttctttaaccataggctagataggctatggaaatggatatgcaaataaaggacagctttaccgaaactatctaaatttttctcttatatccaaagatctgttatcctagggtagctggagtcctaatttccaaaattttcagaaaagaactcaacaaccaaagaaagattagggagataactagtatctactgagtccccactatatgctcacacagaaacttatatttgtaaatcttatatctcaaggccacattagtctggaaaaaaataaagtggggtcaagacaagaactagcaacagcatatctgcctctgccttcactgtctcttgtaggatctctacactatcttctttaaacatgatttgctagcagttctgggagtcctctggtgtagctcaaagatgctcacagagagcatcctctcagtatctcgaagcatctgccaattccttcctcctggcttatcagtctttgatctatgacggctatcagacctgctgaaagtcatgaaacagctaaactacttccactctgccaatagccctagggatgttgcattcacaggtacatttatttaaaaattctccctgtgaagagttgatgtacgtgcatgttaagtcaacctatagctacagctttgaacagttatggctctctaatcaggaattaaaactctattttgttgttgttgttgttgctgagacagggtgaagtgcaggctggagtgcagtggcatgatcatggctcactgcagccttgacctcctgggctcaagtgatcctcctgcctcagcctcctaagtagcgaggactgtaggttggcaccaccatgcccagctaattttttattttgtgctgagacggggcccttctatgatgcccaggctggtttggagctcctgggctcaagcaaccctccctcctcagcctcccaaagtgctgagattacaggtgtgtaatctcaccacacccaggctgaattaaaactctagagatggttacttaagcacttaatagtgttatcagaagttgtgccagagggtttactggcaaaaatagatattagaaataagttttaattgagtaaatgaggttctaatgctaccaaattcagtcacagtcttggaaattctctatttggttttgtttgggtttcatatgtatgtagtcatactttatatttgtgtgtgtgtgtgtgtgtgtgtgtgtgtgtgtgtgtgtgtgtgttttatagtgcagccctctccttaggcttctgatatgagaacctgggcctgaacagaaggacatcagaatggttcgtcccaattagtactcaaacactcccagcctttggtcctgattttctgtattcacaatcttttgtgcaatctctactttgtattaccttaacagagttatttcccataataatttcttttctcttaagctttagacctctgttaggcccattctataatgcccacacatgtttataccaaagaagaacactcctatttctgtggaaagacaaattaaacttctgtctatcagagccttagtaaatagaagttcaaaaagcagagtttttataggaaaagaaggaatcttgagattaaagtgcattcaaggaaacaccaaattatatttagtagagctttaccagagatttatttttggaaattgttctgatagtcaaactagatagtagattccccattcacggagttctatgtggaaatactcaaaattataggttaagcatggtagatctttcattagcatcaattttaccaagctatttttgccaggataaagggaagtatttttatataagtaaaaatagtgtactactgaataataaacataatttgcttcggtttctaacagaagtctttgaagaaatgttgttttcttggttagccatttagtgtaaggccccagacttttctggaaaatttaggtaagcactaaaaagcaatatttgggattgtcagcaaacattaaatcactgtatctaaatatgaatcttctatattttaattttaaccatgatccctgcaatttgaagtgaggtaagaggaagagaaggaaagatcatccattttaaagaacaaagaggccaaaacaagcaatatcataataaatgtagcatagaattatagagaaacctgaattgaattacattgtgattgctcagtattatatcacagtcatatgtattttaagatgaattgctggggttttaattaacatgtaggaaataaaacagtggaaaataattttaaacatatttataacatatatgataatacacctgcttttaataagtcagctgaattacatttttgtatgtaaaagttaattttcctatttcatagatatggaagtttgatttgttttctaatttttctttaactccttgcattagatgaatcctatatctccaagtactatatttagtcaagtagatttcctttttaagtgaaaaatgggttttgagatagaaaagagctttgccttaatatgccaattatacagctctttttaactctaacttgtagtctgagagatggtaagatttttcagttcagttgctctcaacaactgagatattgactgactcaagtttgagttacaaataaatctacataaaaactttcactttattgattcttttcaaaaacttctaattatgctttcaggtggttaaatggcaaaatctaactgcatctatgacaaagtgagctatattaaaactgtgggataaaggagaaaatgactactaaccagtgggcaactgtcaacaatacttccctaaaacaactgttgacaagctgctagacaaatgtcaacttagatgagttcaataaaagtagatcctgcagaatgagagggagtccctgtgttggcagagaggagcctgtctttgttagagacagaatactaaaactgtgctgatcttgggtggctgtacccaagaattcatcctttcactggacagtttccaagttattgtactttataaaataattggcattatcatgtttccatatactaagtcaatataagtgcattttcagaacagcgatgggatcagatttcactcagaatccctctgtcagaagaatccagaactcacaaaatcctattgttccaattaagaacatggatttgggaacacctggatttgaatcctgcccttctttttagcttggtgaccttggccaagtcaccaagtgatcctttatttgtagaataggaatagtcatagttagctccatgttgcccgggaagaataaatgtagtgacatgtgtgtgagatcttagtagagcacatggactcagcacttgctcagttcatggtagctctcaacagcctccaagacacaaggagtcagctgacatttctataaatacttgtctcagctcttgggcaagtgggaacttgtgttctacaaactctgatcattgaatcgataggatttcacttagcatagttctttaactttcctaggagccaacatctactgagcacttaccatgtaacaggctctattctgatgttgttttgttttgttttgttttgagacagagtctcactctgttgccaaggctgcagtgcagtggcgtgatcttggctcactgcaacctctgcctcccgggttcaagcaattctcctgcctcagcctcccgagtagctgggattataggtatgcgccaccatgcctggatggctaatttttgtatttttagtagagaaggggtttcaccacattggccagtctggtctcaaacacctgacctcaagcaatccgccggccttgacctcccaaagtgctgggattacaggcatgagccactgtgcccagcctattctgaatgttttaactgaattaatccatttaatactgatatgaactgtgtgagatagaaagtaaccttattttacagagaaaaataaaattatgttataggattgccttgtattgaaaaactagtggggggaagagatgggattgaaatgaaaataatctaacacataaacttgtgtctttattgctacttttattgcctctcctactgagatgtaatgtccctaaggaaaggatgattttgaatgttttgatgtcctccaagcacttgacatgttgtcctggcacagcatgcatgttgttctttagggatctcccaatttatttgaggagattcaatgtgcaaggatggtaaaacataatggcatttataaagccccactctggtccaagtattggattcggtggcttattggcctcattttatcctcaaactgactttgaaccataggtgtgcttacccttatctataagtcaatcaggcttcccaggtatcatacagaccccactccggtgtgtttaaacagaaatggaattcattaaaggtagttctgagaatttctaagtgagctggagcatcatactcagatgattcttggtcaagttcagtgcccaacctcatccccaggactgcatacggaagcggcactacagctcgtatggctaacgctgaacattgaaatcactgacactgtttttcttggcatctgctggctttaccacaacccttgccaggaaatagattctgtttcctcacttccaaattgaagtcttccaagagcgcatctgattgatggaggcttaggtcaaacatctgccttaactgcaagggaagctgaaaaaagtgtgtgaatttaaattcagagaagcaagacttgtaaactgagggaatttcctgattacaggaaagatattaaaaagtgctaggtttgggggaaaaaaaaccactttgtaaatatccactacacttccattttacagatgagaagactaaagctcataggttagatcactgagtgcatatcacgtgagtagtaagcagaagactgagcatatagaggcagacctgtctccccacacaaagaaataacaaagcgatgagaggtttcaacagtcaatagcagagcagttcaggggaggaaggctcccttccgggtgcggtgatcacaaaaggcccaagcaaagtaacatcatttggacagctccctagaatcctcatctcaaggctgtaagaaaaatcttaggaatgatttagtgcacattcttcattccacggaggaggaaactgaggcttgtagaaaagaattgctctgcccaaggtcatagcctctttgtggcaagtagctgaaaacccaaacccgtgacagtaggtccagtgctctctgcagcaagccgtggaccccacctgctaaatcacatctctggcagaactgtcgggcagactttctttgaattgacaaacagaatgggagagaaagtcacgtgcttcagtcaaagcaaaaaagaaaagcttttattctgtatgtggtttctcatagaatacttctcgcccagctgcgcccaagtaggtaaaaggctcttgcttatgctaaggagcctttcttatctctgcacaccccactcctttcctgctaataccaagtacagaaggcaatgaaagaaaaggtcacctgccttcctcctaatgggacactgatgtttttaagtgctcacgtgatctgtcccagaaaatgtcaaattgttcccttataactctaagttggcggttagttgagtggctctgttgtccagacaatggatccactcaatttttgcctctcatttgaacacccacatttaaaaaaacttgggaagaaaataatggaaaagttgacctctcagttttccggaaaaggtgaccatacaaatgtgtcttttctggctgtaggctttatgaaacttctgagaagaagcgtggtattttagataaaaacaagggtttggttgttagactgtcctgtggttgaaattcagctctatccttgctggtgtgtgatcttggacaaaagacttaaacttcctgagactcagtttgtatgcaaaatgagaataattataaatttgtaggggattagaaataatgcagattcttgacatttattatggacttgttatacatgaaggattattagtttcactctttatttcattaactactttgacttaagctggtctctttgatgaactttcattgactctctggtacttgacatttgtataatattactttcaaaaatgcattagtaggctgggcgcagtggctcatgcctataatctcagcactttgggaggccgaggtgggcagatcacctggggtcaggaactcagatcaagaccagcctggccaacatggtgaaacctcatttctactaaaaatacaaaaattagccaggcctggtggtgcatgcctgtaatcccagctacttgggaggctgaggcagaagaatcacttgaacccgtggaggttgcggtggaccgagattgcaccattgcactccagcccctgggtgacagagcgagacactgtctcaaaaaaaaaaaaaagaaaaaaaaagcattagtaatatgttaactcatattattttcagcaagctttttaaaatatgattttgttacttttttttacagataaggacactgcattgatgagtccttaagtaactggtgaccaagatggccttaatgtctccctcagcttgactaaggtttacataggtttctttttgactctaggccactggcttcttttttcttagataatttacttaaaaaaaaaaactctgcaattgtaaattatttctctacaatctagagatgtctttctcaaggatttgggactaatttccttgaagtcatagaagaaaataagatgcctatcttcctatctttgggagggtagaggatccttagacaagtgacagccaatacaaatggcctaatcacattgaccaactacagtagtcctcccttatccttatccgtgagggatatggataattcatttcagtaaatgcctgaaaccacagatagttctgacccctatgtctattacacacaaatttctttttccttcacaatttcgtggatagaagattcattcttaccctagattttagcaacttcagcatacgatttttttccttaactagacaactttcaccttttcacccaaaggaaatactttatggcttctcattggaatattcaaattgccagtatcactactcttgtgctttggggccatgattaaataaaataagagttacttgaacgcaagcactgcaatacttcacagttcatctgataactgagaagactactaagtgacaaagggaggattcatgtcccaagcaggaaagagtgggccagggtaagattttgacatgctacgcagaatgccatgcagtttatgacttataaattgtttatgtctgggattttcctttaatattttagatggcagctgaccacagataaatgaaactacagaaagggaaaccccaaataagggaggactatggtatacctctaccgtcttccagtacttttccattagctcatcccagagtttaaaactcccatttgtttttttttagagttgtgttcaccctttctctttcccattgcaataatcttgacctctactgaaatagtccagaataaaacctttcttgcctgtctaacttgtctgaggcaatttcttttacactggcccaaagtcactgaattagacaaggtaaagctaagatttttagtcaagtcatttgtgtttttctcatatggacttaagttgggctttaagaccaagactgcagaccaaatttttattctaagaaaggcattatcctggaatcacaatctaactaaaacagcctttgttttctcctctgaaaagtgagaaagctggactagattcctgtctcacagttggatcttggagatccttcacaagccttgatggactagggaagaggggaccaaaagaggcctgactgggggctccacaatcatgcatgcttaataaataaataaaataaattggggccatatgttgacctcatcaagaagggtggatgctgctacaagtaaaaaaatggaaaatcactggattctaacatttatatggcctgttctagctctatttattttttatttttatttttgtgatggagttttcactcttattgcccaggctagatagagtgcaatggcacagtcttgactcactgcaacctccacctcccaggtacaacaaactctcctgccttagtcacccaagtagctgggattcaggcatgtgccaccacgcccagctaatttttcctatttagtggagacagggtttcaccatgttgctcaggctcctctcgaactcctgaccttgggtgacccacccacctcggcctcccaaagtgctgggattacaggcatgggccaccatgcccggccttgttctagtaacactagctccttcctaggacatcaaaacaaatccagcacacctgtcttttcctcagagcctgctttcaaagttttatctatctcacatgtttacatgtttatctaatactgttgctgataagcagatattcagtgagtaggtactcctcagacactatctatttacattttcattaaacaggatctactttggagataatttccaagtcaaaaagaagaaaagcacttaattgataggaattccagatccctgaactaggatgacaggtgcaattggcttattcactcaagagttattgaatgcctactatatataggattcaaatccctgcattgtgtagggatttcaatatagagttaaaaaaatctggcccgtggagaatacaatctagtaaaagagatttgctatatactcaagcattctcaaaatcctaaatttaaggaagaagaattgctgatttagctttttggagttttaattcaataagaataaacacaaactatgctcaaggtatcttaccaaaccatatattacagggaataggagatgagattcacagaagcaggaaagattgtttacctttatatctcttctctccttcaactctctacttcacacctatcttcttcatagcagggctcaaaacatggctattaaatgcgtaagtaaatatttaataactacttcctgcattaaaattatattacatttggcaaggcacagcggctcacacctgtaggggtcgcagcattctgggaggccgaggcaggcaggttacctgaggtcaggaatttgagacaaacctggccaacatgacaaaacccggtctctactaaaaaacaaacaaacaaaaacaaacaaacaaaaaacaacaaaaattagccgggcatggtggtggatgcttctcaggaggctgaggcaggagaatggcttgaacctgggaggtagaggttgcagtgagctgagatcatgccattgcactccaggctgggcaacagagcaagactatgtctcaaaaaaaaaattatatatatatatatatataaaatataacatttaaaaagaaaaatttaaacaaagtttgcaataatttatcccccatgttttacaggttattatacttttccaaattaaattcaggattcaactgctaatcttggcttgagcaagacaaatctattagcatgccccaggcaggtttatcaaaaacatctttttactattaaagcctcaacctacttcagctacaaatccctgcagacttacttagcataaggcactatcatttctatcttcattacaacacagtttaattatctgccttagaaataaggttcttcctcttaatgaaagtggttagtctggtggctccaaagggcacaaggcagtttcaaggcttaattctgattatatatgcaattacaagttagaaaatatgcttgaaagtcaatgaaagttctttcatctatttctccagttagaaaacataaacattggttggaacgaagattttgttgttgatgttttacttgtctagagcattgcttttcaaatttgaagatggcgcttccaggtgtcacttagtgtcatctgatgtcagttccatcgttactggggttcacatgaaggtagtggattcacagacctcagtttatttccaggtatagtaaccatgtgtccaggatagttatttaagtcccatgggtttaactttctcatctggagtcctactttttggggttggtgatgatatttaaggaaataataggcatgtgattggtgagaatgttagctagtaattatattacttcacttaacttctcccttccaaaactgcctattctaagtgtttgcttcctcctgtcctgtcgtcagccatatttctaacatcccattctcatctgaggaccatatctcctgtgtcactgagaaaaggagtcaccagagaactccttctagttttctgtcttctaacaccaaactttttttttttttttttttgttttgagtgtctcattcattgctcaggttgcagtgcaagtggcatgatctcagctcactgcagccttgacctcctgggttcaggtgattctcccacctcatcctactgagtggctgggaccacaggttgcaccaccatgcccagctaatttttgtgtttttagcagagtttgggttttgccatgttgcccaggctggtctcaacatcctggactcaagcaatccacctgccttggcctcccaaagtgctgtgattacaggcgtgagccaccacgcccagcaaacatctatattttctattatctttccttctcccttttcatctttaaggaatttggaccccatattctaagactcatttctcagcctgggcttttgcccaactcatttgaccttcatccagaccttctccatcatttttccttgcttcttttagtgaaaccttgcactttctgctcactctggttcatttccctcagcttcaaacattgagatcatagtagccagattcagttcacaaagcatccttcacataaagttttgctaaggaaataacaaagatgtgtacaaagatttttgatcaaggatagccattgtggaaatatagtaggaagcattggaaaatgccccagtggtcaacaatataggttagctaaataaattagggcaatattggttagctaaataagatggggtgttttagaaaaatagaaaatgttatgggaaattctttagtcatgggtaaatatgtcaagctggtattaagaatcatataaatgcatgtgatgtctgcaggcaggcacatgtgggtgttatgcattgaaaaatgcatacatgctatttctggcttgtgagatacaggctaactttaattttctttgaatttccttgtattctctaaacttcatacaaaaaaacttattttctttctataataggtgagaaaacaatgttttttaaaaaatgcttctttgcccttgtgtcctttcaaatgtcaactcatttatttctttctcttagctatctttctccttaaagtacagtttacataagctacctccttccacttctttcctgattatttacttttcaatctaatgccagttcattgagcccccatcatgggtcatgcactgagcaaagcacagagcaagtcactgaggatacaaggatggtggtggctgaaaaaataatgtttttttccatcaagagctttaacaggctgctaagaaatgaagtactctctccgttgaatctatcccaagaaataagtccacaaagaccacaaatataccacaatgtttatgataacaccagtttaataagtacctaaaaatgtaattactgaaactctcataaatctcacttctgcatcattccaaaatccataaacaaacacaaaaatgctcttaaagtaattccagattaataacatgaatcaagcttctagtactagagtttatgactagaatcctaataatagtttttcattgatgttgcttaaaaataagaaaaaagattgatttatagtaataacatagatataaatatctgtatccctagagttctgctttgcaaatattaaagaatttttttatggtgagaaaccaatatacatttattagataatacttgccaataagtaaaaagtaaataaaataagaatcacacatatatatgagtataaattaatcattttggagtggaatttacagcttcagtttttacagatagtttctttctttctttcattatctgggttaaacaaaggaagaagaaactactgttggcaagttgcaatggcttctttcctctaatgtttatatgtgtgtgtgtgtgtgtatttgtgtgtatatataatatatttagtatatttgtgtatatatatagtatagtgtatttgtgtatatatatttgtgtatatatgtgtacatttagtatatatatttgtatatacatacagacatatatatataaatcttatccttatgtagtgaatacaatactatgtgaatacactatgattatgaagtgattatatagtaacattctaatctcctggttatgaaaaaaatacttaaaagtttatactgaaaggggaggatgtgttaatctgttttaagtttaggctacaggcagaatatgacttctcccaaccaaaggcaacattcttgctaactttagtatatgttaggtttcaaataccaagaacagaacttggaacaacatggacatttacagggcaatcacagtaaaacctgctgcagtagaggcacctcagatggatgcttaaccagccttataggtcaggaatatcctcctgagggaaatagcataaagacatttaagctgagtcttacaatgttagctagtctgagaggaaaccaagatagggtgacaagtttttttttcccacttaatatcatttgattaagtgtccttgatttgattaagtgtccatgcttggctccaaacatggaaactgggaagctaaaaaatagtcattctctagacattaaagctgcagcttctcttaaggctgattctcagtgatattttagctcttgatcacattaccttaccgggtttgatcatctctaagattctactataggtgggagtatcacatggattgcactgactttcaggatctttggattctcatccatacgttcatgcatccatccatccatccatccaaaccatatgtactcatatgttgaaaggggtcatggttgataccatggtataatgagctgtgaagcttctccatttagggagtttttcatgtaataggtagggctaagtcgagtgcatgtggcaggcacaagcagaatctgcagaagttctgagagtccatgtaatcgaaacagtctcctctttgacaacaaggcagtttttcttctgacttcactgcattcattacataccattactacagatactgtaattctttcctttgggcctttaacattctctgtgggaacattatttatcaaagagtaaaattttgaaacttaataaaacaaacataggagagattcatgactaacactggtacaatagtgcccttgggtcaaacatttgctttactaaaatgccaaacagtctccagtttctaccaataaaacatgacttcatttgctttcagcactgttggaatgcctctactatagcccttagtcagaggagatataattatgactatagcttcactgatattggatgttataagtggacattcagaccaattagaaagaggaatgtctgggaaagaacagtcaagggaaggaagactgttggccttgcaacaggagacctagccaagggtatttgacacattagatgcaggatgcctagtgaaataccttgagaaacaatagtgaagctatgaattggaaggaaacatttcagcagaagcaatctgaatgatgcacacgatcatatcattttcttgctcaaaacaacccagtgattcctctttggaattagaataggtctcttcagggggactgacagcatccttgcagtccagaccatacattttctttttccttactttcaacttttcctcttttccctccccctgtcctttcctttcccttcctttcctgtctttcttttcctttcctttccttctaataatacatttaaggggtacaagtacagttttgttacatggatatattgtgtagtcatgaagtatgggctttccatgtaaccatcacatgaatggtgtacattgtacccattaagtaattttctcatctcccaaccccctctacccttccagcctcacatccttccaagtctccaatgtctattattccattctccatgtccgtgtgtacacattattttcaacttcatctattccatattatcttcttaaagtgttttaaaaaattatttttaaattgttaaaatagtatatatagtatatatttatcatatgtaacatgatgttttgaaatacgtatgcatcatggaatggttcaagagagataatttacatatgcatgctctcattttttgtactgagaacattaaaaatctactcagcaattttcaaaaatatgttattaactgtagtcacattgtttgcaatagatctctaagttattcctcctatctaaatgaaaatttgtatcctttcacttacatctaacccaccaccactcccagctccagaccctgttaatcaccgttttactttctacttctataagatcaagtgttttagatttcacatatatgtgatctcttgcagcacacgtctttgtgtgcctggcttctttcactaaacataatgtcctaaaggtacctacatgttgttgtaaatgacagaatttccctctttttaaaaggccagatagtattctattgtgtatatgtaccacattttatttatccattcatctgtcaattgactccgtagtctagccattgtgaataatgctgcaatgaacatgagtgtgcaggtatctctcttcaatttattttttttcctttggatatatttattttcctttggatatatacccagaagtaagatttgctggatcacatggaatttctatttttaatttttggaggaactttatgcagttttctgtaatggctgtgttgtttttgttttttttttttttggtttttggagacagagtcttgctctgttgcccaggatgaagtgcagtggagtgatctcagctcactgcacctctgcataatggctgtaatttatatttccaccaaaagtgtactagggtcctccttttttccacatatctgccagtacttgtcatcttttgtctttttgataacagccattctaacaggtgtgaaatggtatctcattgttcccccccattcttgttccctgatttccaattgcaggtcttatccttctgctccttaagccttcccaggcattcctcttgccttggaacttgctgttccttctacctgggagtcttttctctgatctttacaatatggattctctcttatgtagatcttagctctaatgtcatctcttcagagatacttctggtcaccctgtctacagcagcccctcctttcctctcccttctcaggccatcactctctattcctttgcaataattgattttccttatatcgtatctcactaccaaaaattgttgtttattaattttcttgtatattgctgcttgttttcttatttattgacaggcagtacaaagcagtggttaaggataagaataaactccagagtcagcttgggtttgaatcccatctctatcactatgcaggtgaccatggcaagttacttaatttccctatgtttcaattttatcattaataaaattgggataaaaatagtacctgcctcataggattattgtgagaattaaatgagccaatcagcataaatcacttagaacagtacctgaaacatagtagcactaaataaattgttattattatttgtcttttacattagaataacagtaagaatcttagccctctagttcaaatgctgaattctctagcatctagcatagtgttttgcaatagcagatactcaatcaatacttgaataaatgttttataggagattgcctagaggaggagaagaaattttcaggggactagatctgaaaaagcaatttaagtcacagatgaaaagaaattcgctattacgtaatgaagacgagagatgggaggggttgttagcacaattagctgtaacctggtattaatgaggccaaggtgataggtttggcacttttgtgtgttccacttaggttcgttctctgccatgatcatttgttctgcatttgtatggctagtcagctgtcttatgcatcaatgcccacaatcaggaagagagagaacaaagaaatacatttatcaattatggctaaggaaaatccatctgaaagtgtcttcctgataaacagtggtgattcttggtgttgtcaatatggcatatttcagtactagctctctactgagttcaaaccacctagcacaggtgatctcatactaataatatttccagtgcttaaacaaccccctcctgagatggaagttgggtttgagaaattaggatgagcattcccaatttcttctcccttcctgaaatatttttggttgccaccaggtggtactaggtaagcacatccgaacaggacaatgtagttttattatacaaaagattgccaagagttgcaaaaaaattcctacgtataacttctagaaagattactattgtataagacagaatacacttcacttttggtttagacttttaaaacaatgtttcatactatctaatattcaaattgtgctaaggtttgggagaagactccatcttcctatgatgaacgctttcattttggagtagcttttgtcttaagcaggaattaaaaatcctaagtcatgacaatttcaggtctccagagaaagccttctcattttcccttagaaatttacttggaatttcgtcaggagttttcttcccctccttttcttctttatcttcctcttcctccttttctgctcattctcctcctcctactccctcttcctcttcttcctctctgtcctcttcctcttctttttcttcctcctcccttttcttcttcttcttcctcctcctccccctcctcttctcctttttctctttttccttctccttcttctaatctcctattttccttctctgcttcatagacacgtgcttttgcctgtcttagtttactcatctgagaaatggggctagaaatacatgcctaactaggttctttaaatgtgaaagcatgtatttgagtgagtagtcagtaaaagatagcttgtctttgtcatcatcattctaatggacattttcaactaatccttagggtcaaaattattccagttcattttctttatttgataggattttaactgtctttttatccatttccataattggcaaatgagttcacatgaggcatctactgtatcagcatgcagctatgagaagaagcatcagaaaaaataattgccactgcctgggcacaaatttttccctccctgtcttaacaaactgctttatttctgaccccttaactacagtgtttcttgttcaatgctgagtacatcttgcaaaccaagcttgaaacacagacctgctctctatcctagagagtaaccttctttctttaatctgaaacataaataacctacctcttatttccaggtgaatagctgtctatttctatttgactttctgatcatgtgtccacttttccaagcttatatcctcaatatcccttttacaaagatttaccctgtctttccttttcctctgagtataatactattttaagaactttctgctcagaacttttattatcctgaagactacagccaaattgtcataaggaaacagtgactttgtgaaagaagtatgtacttttcaaagctcaactccttgtccagacacatctggcaacacctacaaatactgtcagctaaggctcctgctgtggtcatagaactacagcattatctcagagagtctgtaaagtcctcttattctggggaagtgggtaagaaagtcgaagtagggatggaataagggaaagagagtgtagataaaagaaattctcctgaagagtatgtcaccttttcaagcatctctaagtgaaattggttcagattcctaatcttacatacaattcaataattaaagaagggttaagataaattcaaatcggcatcacttatgcatttaaagaacacgtacaattttcctttctgctttctcaaccctttttaagtttatttgtttatttttgagacaggatctcactctgtcacccaggctaaagtgcagtggtgcagtcccatctcacagcggccttcacctgccacgctcaagcaatcctctcacctcagtctcccaagtagctgggactacaggcatatgccaccatgtccagttaattttttaaattttcttttgtagagacagagtcttactatgttgcccaggctgatcttgaactcctgggctcaagggatccctcatcccaaagtgctgggatcacaggtgtgagacactgggcccagctcaatctttttatttaatagcccaacttcacaggatttagaaaaaatagtcaccaaatatcctattttagggtagcatgagcattttctttttcctgaactccatatgtttggcttaaggcaatgtggatattttctcattttattttattctcagcaatatagcaagaagtaattcatttattttgttaaatctctaatgtatagcttagctgaagtcaataaaagtcaaagttaccattcacataggctatggtccatttctgacaatctcaaaaccatgccatggcacttaaaaaaacctgctattttatatgtatacttaggtttctcattcaaaactaagcaaacatggaattcaaaggaagttaatcatgtgtgactgcagagtggaaataaaatgaaatttctaatggtaacaaatatataatcagatcattaatgtttattaagggcaaagggacattccaaacactgcggcaaattgtaaagtgctgtaacctctaagagtgagacctgctctgtcatcctcactgagatttctacctaattcgttaaaattcatttttgtttattttaagtatgcatacttgccctctgctaggaacagagggaaatgcgtgaaaaggttaatggggttttgattacttgaatgggcagaggagaattccttgtcaggagcacattgcctgtaggtcaaactggttacaataatgccctatggttttagggcatttagattctccttactaattcttcagaatcctcattttttttttctgcaggtatttttctctgcctgcagatcatgcactctctatgctcaatacattctgacaacacactagtcctgctctaattcacctgagacaaaatggcagcaaatacaaaataaccttccaggctggctcgaaattagcataggctctgtagcccaacggccccagggctgaaaactgtaccctttactagacagataactttgggaaagtcactcaatttttctgaacttcagttttatcatctgtcaaatgggtctaactatcaataatgacaattgctgccaattcccagttcatcaggtagatgtgacagtaatatgagaaaacttttacaaatcatgtagcacatagtcaacagatcagtatttactaatactacttaagtatgtggaggaaatgcttgtcatatttaataatttttagttatttatcttagtcatgagttttgattattgacaacattgctccaaagagttttgttttaattgccttacagatgctgtgttataaaggaggacagttttgtgctggagtgaaggataaacacaggggaaaggcacattttcaaagcagcaatctcttgactagccatatcctgctttttactcacttaaacctctaaatccacagctgcaagcaaccaaaggccacaagtcccaaagaagcaatctaatcaaagaaaacattgaatcaaactggcttctctcccttctcctcaactggcatgaaaaatgctaaaggtggtaataataataatatatttaacatttctcatgttttttgtttctaaaacatatggtttcttgctacatgtagagaattgctaagacattcatttcagctttcagctcttgcaaattaaacatacgttgtgtaaaaactactttaaatgaatgatttttgaaatgaagttttaaaaagtactctttgagagatgaactcccttttttccatatatgtatctggatttctttatgtcttttttgagtagcatcccctcacaagagtagcatcccgaaggaaacttcatagcattaaccatcatggtaatagattaattactaatacaagtatttgtttaaggtctaacttattaactagagggtgagatctctaacagcaggggtcctgcctgttcaccacttcatcatcaaaatctagaaaggagctaggcacatagtagaacctcaaaaaagtttggaaaggcagaacaggttgtggtgaggagacagctgtagagttagaaagtcctagaattgaatctgaataaaaccttacacactctttgcatacttgggcaaaattcttaagttccctaatcagtttcctctttgataaaataaggagaataatacttatgttgcagagctattgtaaaaagagtaaaataataatgtatctaaagcatacagaattatacctgatgcattccaagtgttttataaataattgctattataattatcatgattactgtatagtggatacatgtagaattaattatttaatgtgatgctgaggaccaggccttgactattgagtctttttaaaggcattgtctcccagtttcccatctgcttcacagctccatccatatgcctttttgaaatacacatccagctcctggtcctttttaaacttcgagaaaaagcatcttatgtcatcaaatgtcaatgtaatattaaaggcatttgtatctctgtttaagatcccacatctgttatcagttaatattttgagagattcttactagcagcagtttctgatccatgccataaaaaatgcttttcataaaattgtgtacaaaacccacttatgttttaaaagcccaatgatagctcactaagtatagtgatttcttcaacatgatgttgtcatctgataggtgtgtagggaagcaaagcacatttgcacttgtcctaagaaataaaaagggtccttctgaagttcatttaactcaacttttctattctcctcagttaaaaggttttgccacttgagagtgaaaaattatgaccatagaaattacattttagtaattactcagatttataaaatcatttttcaaataccaaaggtctagtaaaacattaacattcagggatttcactttcccctttatttctaaaatttgcattttatgttatgccttcagcttttctaatgaggattcaaaacatgttcatcatcaaaccattgatgcatctggatgtctacaactttgtagtttaagtccatcccttatacagtagataactattgaagaaaaccaaaactaatgtaatctttgtgaagaaacagggtttttttcagaaatatgagactagagacccaaagatttcaaaatttctgtgggagtgttgatggccgtggccatttcccactcctgaatactaattttgcatgttcccaaactgcaattctttggagtctcttgagtcatcttttagttggtaatattgttgttgcttcctttgctaagtataatctactaaacaatcttggagttctgattacagaccactgcagtatcttttaagtaactctgggaaacatgaagcctaatgttttggttcgttagtattggttagtattcattagtattggttcgttggtattggttagtattcattagtattggttcgttggtatttggttcagcagtattggttaatatgatttcaagtatggaggagagcaccgcccaacaagaatgctgtgtgtgccacacctcccttaccatttgaactaagtgcaacctttcattgtttctttttgcgagtgggtgggggggggcactgagggtgggagggcaactcctatgtaccagacatggaatcaggtgctggagattcagtgataaaccaggaaagatgaatgaaacccaaaaaccaaactagaaaggttagcaaacagttatcaaccaacattctaaaccccaatggctttaaaggtaagtctagggatgttgtactttatttgccatctcttaaaaaaggaattaaaaaatacaagaagaaagaaactctaatggccagtagccataaaatctatttacatattcttccacctctcaagtctcatgcaaattaatgtgtaattacatttagatggcgcagctgctctgacactctgctcccagcttttatttctgagtttcaaaggtttcataaggaaaccttgaaagaaaaaagtaaatattttgaaaaggagttacaatttgtcagcagtaatccttccctggataggcaaagaaaggcaaatcttggtagatgagagaattgtggcttttgaaaataatagcattacactgaaatttaatctgctagcgttattttttccaagcaaaccctctttgcattcaatttgtcatttattacagtaagaagcaacagggtccaaaagagaattgtttgcagtaagcacagagatattctcaacaaaggtagaatttgatagcatgcacaaaacaacacattacttatccagcattctgagtcaccttttcagcaaagaaccttgtgtatttgatagcaaagggagaagaaatcgtgtttattggaatgttaaaatgcgtgatagggcggacattctattttaaagaaatatgagactggaatattgattctgccacatacgaaggctggaaagtattcataaatgatcaattgcctatagtttaatgacggaagataggcattggtttcccaaacctttttatgctacaacaaaaccgcacaccaagccctgccggagggtgctgtataatcatcagagccctttctgagtatgtcaggatgatgcgccctagtgctgaaagatggtggttacatgagcaacagaatgctagttagcaaggcaatgaggagctgaggtccacattaaccatggtcggtgcacctaatcatgaatcacagctgtgccacccttggcagatgaacaatctcttacagataagacaaattttatctgggatcagtatagtcttttaaatgatgtatgaaaccaatttaagaaaggctgagttattccaaatagtatggcttttattctttatttgtcagtttcatcattccctccttgctgactattcagatacatgtaaaggagacagccaatggtttggcacatagttggcacacaatgaatggcagagatccttgtttgtgttagtattttgattatttttcttaccacaataacatgacctgaaccatgatcaatctgtctttatgcttccagtagagatcttgattcatagctctccctaatattaatccatttcatattgttttatattatagttaacatgaattgattttgaatcctttcctctagaagtataacttgtttgagacacttacaagcagacattcaattatattcagagggaaaatttataacagttcaggagaggaatttaactgtcatgtattccaccagcaggtaatgtcagcattttcttatagttaaatggcttcatcaagttactctattgctttaattctaggatgccatcaattttagggcacattatcagttgagtctcaattcttttacactcttgaggaaaacactccatttaaggtatggattaattataaatgatatcctggtttagaaacattctaagataaactgcatttttttaaagttgaaattgatagtaatttgtgagcatgacgtaagtgcacaaaatcttacatgctttatggtctttaatgttgacttaaaactataatatcaaaagagaaaaattaacagagcctaattactctcaatttataaaggacaggtttcattttcaatcactctccagttttctcaggtttcttattcagccgtataatgtcaggcaggatactaaccagattaggctttatcctcatatctttgaaaacataagttccataacaaaattttccctagaggttacttccagtattacagcatctaagtgattcattataagcactgaaaagggtcacatgtattactttattcatttaaatgaaaagaaataaaaaaattctttatttaaaaagaaaaataatggcaggccttggccactcatgcctgtaatcccagcactttgggaggctgaggctggaggactgcttgaacccaggggtttgagaccaacttgggtaacataacaagacccacacaccaccccccagccctgccgccccgtctctactactactactactactactactactactactactaataataataataattagttgggtgtggtggcacatgcctgtcgttccagctactcaggaggctgaggcaggaggacagcttgagacaggaggatgaggatgttgtgagcagtgattgcaccactgcactccagcctgggagacagagcaagaccctggctaaaaaaaaaaaaaagtctggttgtttgttttagaagagtaataatgaagactcataaatgatcacagcctaggaggccctacaaaatggctgcaattattctgctgatgttggacaagctattttttaggatcaattagttaattgtgtgttgctttaattacttacactctttttaaagctttctttgtgtcacagctgagctcaggagaaaaagtaaagcttgcagagcaattctttaagtgtggatgtaaaatatactaatggatttacttgctagctggcacagtgtttaaatagggtcctgctcacgctgagaaaaaatattttatcagcacctgactccaaagagtcaagaatatggagaaactcacatttctctcatgatgggtaatttctgggtatgcaaagctccctgtagcagtcattcagtatggatcacttattgcaattttaaattttttttttttttttttttgagacggagtctcactcttggccaggctggagtgcagtggcgcaatctgggctcactgcaagctccgcctcctgggttcacgccattctcctgcctcagcctcccgagtagccgggactacaggcgccagccaccacgcccggctaattttttgtatttttagtagagacggggtttcaccatgttagccaggatggtctcgatctcctgacctcgtgatccacccacctcggcctcccaaagtgctgggattacaggcgtgagccacagcgcctggcctaaaatttatttttaaactacaagaagggaatggcaaagtattacatgtttcttaacatgcatctagtcaattagcaaagcaagtcaatcgtttaagcttttcattgtgtaaagggggaggttttatacacggcaatttgaatggctatgcctagaacacgtggaagcacagagaaatttcaaagattatgaacaatagaatggcactaaagacacttttacaaatgttgctttatcaagtgggttttgttttcttgtttttcaagaaaaacagtcttccttactttaaatgtttttttcccataattctgtttactattgataagaatttaatttaagcaccaatgggcaattatggttttctcctcaattgattatccaaaatgttcaatgaaaaatgtttgcctgtgggtcctctcacatttttgtttataacctatgactcctgccacttccatacaccctactagtctctgcataaaaatgaggtttattgacgattggccatcacttaatacaggtacttgatgaatgtgtgaaaaataatggatgaaagaataaataaatgagtaaaggaatcaacctctatcttaactcagccacaagtaataaacaatctcgggtcctaatggtctcagtaaaaatctatataaggtctcctaacttcgaattattttcttaaattattatttgtccataggtgtggtcataccttgtggccatgttcctgagacagggtaatcggaatataagtggaagtggcatagtctttttccaaatctagctcatgagaccatcccacactacccccatgcgctttgccttcccttctctgcagcttgattatcaatgcacaaactggcattggagctcatgcattaaagatggtggaacatcagtcagcccaggttcctgaatgatagcatgacacagcgaaccctgctgcaattttggcctacagaaacaaggaataaacagctgtcatgttaaggcactgttatttcaaggtttatttgttagagcagccatttttttcttttaacacacgtcctctgctttcactaagttcccactcaccaaagggttttactcctactattctaatgatgtcctgtgaatcctgacccatgggttagatctcagctcaagtgtggcttctcaaagggaaacttctcttcctccttaatgaagtcatttctcctctatattctcctgggaatcacatgaccctactccttagcacttgtccaggaaatcttcattgccgcaaatgttctctccctcaaggtcattgatgaggtacagatgccagtcacttcaggagctgtgggcatcacccaggaggccagggcagcaatgcaggtgagcacttatgaaatgccccttaggacacccacagataactgaaggagatgactgccaatgcaattcaattgggaatatatgtgtactcaaatattaatacagataaagtcttatttatgtcagcaggcttctaaagttttggaaagttcatgtgacctaggtttgccgaataaaagacttagcaacaatatagtcatctattaaggagctaggaaaaattttacaaaatgtctcagcactgatgttcatttgtgagcccaggtagctcagatgcactgtgcattaattttaactgcatgtgtgttttatgccattggatcttcaaaaggctcttattgattggacatgtggtagaaaacagaggcattgataaaaatggaaacattcagtgccattcaagaaatcaaagaaaggaaccaataacaaagttatatttttattttgttatttaattttatttcgcttttttgccttgagggtgatagttattcaccttctacaagaaaattgccttcactttgattccaactagaacgcctggttgcaatggctcattaagaatgttgcaacttctttccgcccaagtagactctcaattctcctctttgctgaaccctgaggctactcatgagggttacatgagtaacccagcaacacccagctggctggcttttactttttgtcgagtaagcatcattcctgcaaggaagcagtcagcgaccagatttgggcaactcaagtttcccggcttctctttttgtttttcatattttgttctcttgatctcttcctgctcatttcttacaacaaaaactttgctctggaggcatggacttcttaaagaattttagagtattttaatgattaaagtagtatacagtattacgaatcttcaattagtgaagcaaaagttatcattagtccacaagctattttagcattctagcttattatcacttaacgatttcaatgtttccttcctgggatggcaataatggcatgtttcattttaatagaacacatgttttctgttcatagtgctgatttaaatttgtccctccttaattaagtcattctatctaatcagctttggcatattttctcatagtaagtatttacccttttgcctttttgatggagtggaaatataccttagtcattcaacttgataggacacaacctctttaacacaaaatgataccaccccaggaagaaccagggatttttatcatttactttacaccatgcagatgcctcatcttagcaagactttcttactttcgaggatatcttcaaatttatctgtgcaagactggcttcatgggtgtgcaacctgtataacacacagagctccgtgcctagaatgttctgacacttggtttgctgttctgatattgccatcaataaattcttaacaatatttgaataaggaaattatattttcactttaccctaggccctttctgtactcaaatacctatgcaaggcaaagatgtagattcaaatttcatataatgctcattgttcagggaaaataggtgtagtcttgtctctttattcaatttaacattgaggtagaaaatacagcacataaaacttaagtgtacactctgatgcatttgtacatgcacacacacacagttgtaaccaccaatcattttaagatacagacattatcagctgatcatctgtctccctcatccttcttcccactcaatctctgcaccttctatgggtaaatattatgctgatatatcaccaaattttgaacttaatgtaaacggaatcgtaaacaatatagctttttgtgcttttttggcattctatttgtgagatttatccaagatctaacagagatgtatttttttaaagccgtataatattcaattatatgaatatatcacaatttatccattctattgcagtgggtgtctgggttgtttctaatatttggttattgtgaatattaactattgcgaacattcttgcacatatcttttgatagatatatgcactattttcttttgggtatataactaggagtggaattgctagctcagagtatgtacttatgtttaactttagtagacatcagtagtgacctttgaatgcatattataactttttgccaagctgtatccatgccttcatcatgtaagatttattttgtcttcaatacagcacgttggattgcttccaatagctcttttaaacgtcacaaccatttgggatagaacttttctctatttttacagatttttttcaatattgaaatttagaggacttacaaccagaccaagatttcagagtctgaaagaatacattgattctagttctgttactagtttagtttccataaatacagcaaatcagctgtatttattgcaaatatatattaatcagtagtcacagaaagaaagagaaagtttcagcagagctccaatccaaattcctggtacatattaaatgcttaattaatgcttgattctgtgaatatgtattaaactgtgactatcctaccgttagaaacaataagaaaaatactcataataaataatctatgtttttctgagcattttaagttattatttacagttctaggaatagcttaactttggactcagttagaactatcatcccaagggcacaagtatgcttgagtttcagtaataagtcaataaaacctaaatatattgccaaaatcttagaatgagaaatcacttatttaacaacttcatttgaggggcaacaatattcttgagacacattttaaaaagaagtgttaacaaggatatatgggcttctgtagagaccactctagccaaatacacatacgctatacatatgagtaattttcagaaaattcaggtaaggacctgaaatccaaattactgcatgttgcagacacttgtcattccaagagtaaaaatgtacaataacattattctcgcttctaacaattagtccaggaggacatgttttctaaactctccatggagccctccttcaaataattaacactgttagaaaaaaattttacccctgagagttttaacctctagagccactgctagcattagtgctccctctgtttacaattgataatgagaacagagagacataatttaattgggagggtaaaggggaatttggaaaatgatcagggtgatatgcaaatgttcgtttatttggggtgaccattgagtgctgtgtcactgtgttagacatgatgtttagtactttatagactttttgtcttctcccatttattcctcacagcacatttatgagacaggcactgtattgtgccccagaggaaggcagtctcctgtatgcaagtctttagacctcttgcttatctgtaaaagtaggccttgggtctggaacacttccttaccaagagatagagtcctcatgacctgcgctggacttaccaccttgtgtggaataactttccctgttttgttctgctggagcctgtgcatcatgtggcacctggtcaaccccactgttatatctatcctcttccaggaggggatgaggtgcttcttctgcagcacagaaagggcacctataggccaattgttctgcatcagcctccaggagggaccttctggctttgggggactgacatgcagtactgacactgacctggcgctgtcctttctctatctgaggagtaaagtactgacactgatctggcgctgtcctttctctgtgtgaggagtaaagtactgacactgatctggcgctgtcctttctctatgtgaggagtaaagtactgacactgatctggtgctgtcctttctctttgtgaggagtaaaaaacatcgttcctttgggtatatacccagtaatgggatggctgggtcaaatggtatttcaagttcgagatccttgaggaatcgccacactaacttccacaatggatgaactaatttacagtgctaccgacagtgtaaaagtgttcctatttctccacatcctctccagcatctgttgtttcctgactttttaatgatcgccattctaactagtgtgagatggtatctcattgtggttttgatttgcatttctctgatggccagtgatgatgagcattttttcatgtgtctgttggctgcataaatgtcttgagaactatctgttcatatccttcccccactttttgatggggttgtttgattttttcttgtaaatttgtttaagttctttgtagattctggatattagccctttgtcagatcagtagattgtgaaaattttctcccattctataggttgcctgttcattctgatggtagtttcttttgctgtgcagaagctctttagtttaattagatcccatttgtcaattttggcttttgttgccattgcttttggtgttttagtcatgaagtccttgctaatgcctatgtcttgaatggtattgcctaggttttcttctagagtttttatggttttaagtctaatataaatcatgctgctataaagatacatgcacacatatgtttattgcagcactactcacaatagcaaagacttggaaccaacccaaatgtccatcaatgatagactggattaagaaaatgtggcatatatacaccatggaatactatgcagccataaaaaaggaggagttcatgtcctttgcagggacatggatgaagctggaaaccatcattctcagcaaactattgcaagaacaaaaaaccaaacactgcatgctctcactcataggtgggaattgaacaatgagaacacctggacacaggaaggggaacatcacacactggggcctgttgtggggtgggggaagcggggagggatagcattaggagatatacctaatgtaaatgacaagttaatgggtgcagcacaccaacacggcacatgtatacatatgtaacaaacctgcacattgtgcacatgtaccctagaatttaaagtattaaaaaaaagacacctgcatgcatatttttatcacaacacgattcacaattgcaaagataaggaatcaactgatgagtggataaagaaaatgtgatgtgtgtgtgtgtgtgtgtatatatatacatacatatatgtgtgtatatatatatacatacatatatgtgtgtatatatatatacatacatatatgtgtgtatatatatatatacatacatatatgtgtgtatatatatacattacatacatctaccatgggatactacacagccataaaaaagaataaaataatgtcttttgcaacaacttggatggaactggagtctataatcctaagtgaaataactcaggaatggaaaaccaatattgcatgttctcactaagtgggagctaaactatgggtatgaaaaggcatacagagtggtataatggaaatgggagactcaaagaagagagggagggtgagggtggttaaggaaagaaaaattatctattgggtacgaggtaggctactctggtgatgcgtacattaaaatttcagacttcaccacaatacaattcatgcatgtaacaaaaaaccacttgtacccctaaagctactgaaataaaaaaaataaaaatttttttttttaaaaaaagcatcgttccatccagtgcctgattgtgttgtgttttccttggtgactccaatattaaaatcaaataggcagaaatgctgatttctacttctgatataggcaagagatgccacttcctccacagtccctactttgcaaaagaagaaactgagtcaaagagtacttaagtgacttgtccaaggtcacccagtgaataagaggttgagattcaataggccagacctattttattcaaaaaaatgggctttaatccacacttttctccctataagcttttcttatgtaacttaccattccaataaagaaggaatgtggaggattcagatgagattgcagatgcctatgtatcaatgagcttcatgaagctttctgttttagcagtatctgttatagcccaatatgctttaaactgaggcactagtgtggcataaagctaactcaaatctatttattgctacaatcaagaggttgacatgctttgagaacattcaagttaaaagaacaggaggtgaaatataatgaaagagaaggatacagaaagaaaggactgaaaatatgattaaatgtcagagaagaattcagaagtggtgttgtagaactcctaagtgctcacacattttcattaatcataccattgcaggatactatgaattgtgatcatctactgcccatttatttttattttgtttttgagatggactctcgctctctgttgctcaggctggagtgcagtggcatgatctcggctcactgcaagctccgcctcccaggttcacgccattctcctgcctcagcctcccaagtagctgggactacagttgcccgccaccatgcctggctaattttttgtgtttttagtagagacagggtttcaccatgttagccaggaaggtttcgacctcctgacctcataatccactcaccttggcctcccaaaatgctgggattataggcgtgagccaccacacccggcccatcacaggtattttctaagttgtaagatctatttcctcattatccttcacacaataaataactacctttataaaatacctaatgtgtgtgaagtatccttgtacatgctattcataactatatcccatcacccatcataattttataaggtaggtaaaactttaaacttcattttagaaacatgatttggagaaaagagaatgcttatgcactattggtgggaatgtgaattagttcagcccctgtggagagcagttggagatttctcaaagaacgaagagttgaattaccatttgacccaacagtcccattactggatatatacccaaaggaaaacaaataattctatcaaaaagacacatgcaccccaatgtccatcacagctgtctgtaatgttggactggataaagaaaatgtgggatgtatacaccatggaatactatgcagccatacaaaagagcaaaatcttgtcctttgcagcaacatggatgcagctggaggctattattctaagtgaactaatgcagaaacagaaaaccaaatatcacgtgttctcacctattagtggaagctggacactgggtacacttggacataaagatggaaacaataggcactgaggaatacaagaggagagaggcatggagcaggacgggagttgaaaagctacctcttgggtacaatgctcacttcttgggtaacaggttcaatggtactccaaacctcatcaccatgcaatatacctttgtaacaaacttgcacatctacccccagaatccaaaataaaagtagaaaaagaaggaaaagatacctgattctttttaagcaatgtggacaaggccccagagcagtgacagtccagggtctggtgctcagatccgtctcagtctaacgattaaccatgttctttccacttgtttatatggcttctatcttattcctctatgctcaatggatctctatacctctagttataaatcccataatgggcagggtaggtatcctgctggctgtgtcactcaatagaaaacaaagagacagaatctacaagggctactaggcccacgcctcacatttgttggccacaataggaatatatacagaggctcttggcccacagcctgctctcctccattgtcacctctagctcagtcctgcactgtaaagatccttgcatacatatctatgcccaccccaggccacaagtccaagctcagttcacatcctccacaaataacgaatacttggctactctcctgagctgtaaccgtgcacacttttgtgcaattcaccattcagagttggactcaggaaaatgactcatgcaggttctgaaaaattggcttgtgccacccacttgcataacagattctgggatcccaagtacctgcaatgtggaatagaaggctgtgtgtgggctctggacaggcaggtctcaccttggccctgtggggaactgcacagcaggaagagactcagagtgaaccgctcaaagtcacagtgcccatggatcttcaagaggtgtgtattgactggatgattggcagaaaaaaggggcattgcaacaaatgagatcattacaggaatcaaagagcccaaatcatagtttttaaaagatttttccttggagttgctaattattcgtaatctacaaggcaacctcagcttattctactttgattccaactgagaacagccaggttgcaatgcctcattaagaatgttgtgatttcttttctgactgggtagacacacatctctagcttgctgaacctgcatgttaccactagagctctgcctctgaaaggcaaggaattgccctgttcttgcccctgctggctctcactctgtggggagcaggcactgcttctgcagggatgcaaggcaagtaatcacacatccttctaagaaccttatatcagatactatgcccatgatgcaacttcctatctatgtcttatgaatgtcttaaagaattttcataaacttgaatgatacaagtgatatgaggttagagggaagtcagaggtggtggactcacttacatttgctgattaaatacatctcagttttctgttttggtaataaaaattatctaaagttcaactcccgggaagggctgcttctctttttccccttctccgtcccagaatggctccaggtacaggaaaacacctactagtgttgtagatgaaatgagaatgaaacttgcattatgctcatcgctgggttggtttccattgcaaggcatggttgttctaatcctggaatgtgccccagtcggtacttgatgagggctagtgggcaggaatcccttttggctgctgcctctactcactttgaatatacttctattttgtatttcctccactcttcctatttttttttaagagttctctctctttaatgcatgtgcttagttcagtccaatgaaaggggaaaggattgaatctgatgacctgggttcactcctagctttactatttcccagctatagaatattgggagtccctggacttccttgagacttagtttgtttctctgaaatataagggcataatgtttgtcctttatacagcatagatttaaagatcaaaaagctgtagtttttttgtaggtcaaaggggctctgtaaatcgtaaagtgcttgcagaatggtgaagtggaaatacggtgggattaacgtttagatgacccagccttaaatccaggctctgccaatgattggttttagattcctaatatttagaatgactagataactttgactttccttagaggtctaataatccatgaaattaaaatttcaagtattcaaaaataatttaaattcaacctctgagtcaggaaatgaaaactgatctctttagatttcaaggttttaaatatgataaagtatacataagcagaaggaaacattggaaatagatgtttcacttgaaatgggcagcttttttagaaagggaaacatacaggatccctcctcatttaattcatgtgttcaacaaacatttactgagcatctactagtaaggatgtagaaatgttcccgatatagttgggagatataaaaattagtatgtttgggagcctttatatcaagggatttaccattcattaatggagagaagctcaagaataactacaataagtgggactttcaaaattgctaccaatgagagttatttttaaaagttccactgggaggtaagaaaagaaggaatatatttgctctgtggcagacttaactgtgaatttctggaagtttcaacgaaaagctggttcatcaagaatgcacggaggaataagaatatgactgtggagtaaatactgggtcgaacctcattgttctacaattttctgagtgtaattccacaaatgtcctatatttcttagcaaacatccatttaattcttttctgagagcacgttctaagtttgggcatgaatatgtctgtgttgacgtgtatatatatgactttgcctgcatctttatatcttttttcctcttttacaaaaattaatatagaaagttctgtcatgatcccaaggtataacatgacagacgcttcaggaggtgtctggtctagttggtgagataaaagccaagatgataattctttggtgtatgccaaatgccatgcatacatgatcccatttatctttcacaactgtgtaagccaggcactgtgactagacccgttctccagatgaggagcctaagtcttagaaaggctgaataacttctactaagaatgtagcttgtatgtgttgggtttacgcctcaggactatatttaacaaatacttaaaacttaccacgtgctttacaaatactaactcctttgttatatctctctaactagtctatgagtagatgcagtcttatctccattttatagttgaagaaattaaggaacagagactcagcaacttgcctgaggtcacacggttaataagtggtacacagctggtgtttgaagccaggcggtctgtctcccagtccatgctcctaaccactctgagggcagcttctcaaatcccgctagattgggcttcaaagccctatggttaatcactgtacaaatggcctctttgtgctatcacctgaacagaaacaaatataacatccgtgacatcgagagagctgctaatccaaccatctgcattcaggttctgcctctgtgctcagccagcctgcctctgtaaggcactaacacacattctttctaccactgacctgcactttggcattctcatcctgtggctttaattaaatgttaacattcatttgcccttttccattgtgttaaagataacctttgcttcctgtcgcgtctagataagcttcactccatgacaggtaccaaataggttcatcttgatataaagtaaagaatggagactctttgatcctctctgctgacatattttaaaatgccagtatgaatatttgttttgtacttacttcttttacggaatgtcaggataataaattatttctggatactgcagtagctgaaaggttcaagtccaaattagtcatactaagtggctttgacccttcctgagagtcaaacagacttatctctgagacacttttgtttctaatagttgaaaatacattatggagagaggtgctggttgggatttagagggtcacaatttgctggtttggaggaaggttataaagaggttttctggatctttactcatacattcactctattggatgggggatggcttcttgctaaagtgagaagagcattagactgagaatcaggcctagattccagcctcatttttgccacagatgcattatgtgagcttgaacaagtctcttattttctctgaaccccagttgctttattgttttaacaattatatttcattaacagtacataattgaaggatgttatctgatttgctcatcagaataaactcatgagatgcagatttgtattcacattttacagaaaagaaaactgatctttagagaagttaagcaatattcccaaggtcataacacagctagtaaaggaggtggagccagaattcaatcgtggggctatccaatttggaaatccatgctcttcaccattatagctacattcattgttggagagttctacatgtttatgagtgtactcattgtcgctttagagatgctgcatgtatctcctaaaaatgtttttggcagatgatcactgtctttgatagcccattgcagtgatgccatctctaatagcatttactttcctagcctcggaaaattagacacccccctggttagtcagggtggttattggcagcatatataaaattatcttgaattttacagaaagaagagaattctctgtgtttctgaattttggtactaggagaaatattatatttttataagttataatgtattagaaaaaggatattttaaaatgtaagagaaaacaagagttaaagatgagcttggaaaaggagaaatggcagaagagattcctctttggaatgcatcttacaacaactaaatatacacagagtatctatgacaataaaacacttcaaaatattagtaatattttatgtaggtgatgggattatagaatttctcatttcttttttctttttaagctttgctaaattttctgtaatacatatgcattgtttttgtgctaaaaataagtgaaacacacacttatgtacatgtctgcagcaagcaaacaataaaccatctagtagtcttaggctagctaacatcccagacagcaatttgtctatggcacatatctagactaggctaactgcccaggttggtcacatcaaaaaacatatgtccctttgttaatctctctgatgtcatccattatttccaacctaatttcatattagattattagtgcaaggctttcctaaagcaatacacctcttaaatgattacatgacaggaagtcttcagactaagagcctattttaatcagttatttccacttctaaaaattatatttactttctttttcattttcttttttttttctccttttttctttttctttttttttttttttctgagacatagtctggctctattgcccaggctggagtgcactggcatgagctcagctcactgcaacctccacctctgggactcaagccatcctcccatctcagcctcccaaatagctgggactataggtgtacgccaccaggcccacataatttttgtattttttgtagatacggggttgtgccatgttacccaggctggtctcggactcatgagctcaagtgacctgcctgcctcagcctcccaattacagggattacaggtgtgcgccactgcacctggcctatatttactttctagtcattgaaatagatcaagttttttcaatgcaattaatgaaatgcattatcctttatttatgctaattttgtcctccattccatatgtctagaccccttgtactaatttttggctatcccacagtttcgtaattggccttactctttctcatgattcaccagccataggcacaatgtcactagactactctttctaagatacatcaagtgggtcaatgcagtctttgagaatgtatggtatttgccccaatacctataatcccctccaaaatagcagacaaaatagtctcttcataacctggtcctctaagtttggtatcaaatcacatttccttgatcttctaacatgcttcaaccacacctgcctttctgccacatggtcatactttactcagcccctggccttctgctttgattcttatttttttctggtcattgacggtctttttttccccttctgcttattttctttctagtgttatctcttcctaaagccttctgcaattaccgtgcctattgaaattgctctttttcatcagtctttagtaattaaactcttttgtattagtccattttcatactgctgtaaagaactgcccaagattaggtaatttataaaggaaagagatttaatggactcatagttcagcatggctcaggaggcgtcaggaaacttacaatcatggcagaaagcaaaggggtagcaagacaccttcttcacaaggcagcaggaaggagaagagcaagcaggggaaatgccagacacttataaaaccatcagatctcataagaactcactctctataaagagaacagcatgggggaaaccatccccatgttccaattacttccacctggtcccatccttgacactcagggattataaggattatggagattacaattcaagatgagattttgggtgggaacacaacaaaaccatatcatctttactaaatatttattgttgttttttaactaacacataataatttacatatttatagggtacatagtgatgtttctatacacaccatgtatagtgatcagatcagggtaattaacatatccgtcatcttaaaacatttatcattcttttgtgttgggaacactcagtatccttctaactatttgaaactaatatatcattaactatagtcatcctatagtgctataaaacactagaacttattcctcctatctagctgtaattttgtatcctttagcaaatttccccctacccctctttccccaacactcttcccagtctttacaatcctttgttctactttttattctgtgagattaacttattttagcttccatatatgaatgagaactttctgttcctggtttatttcacttaatatgatgcccttcagttccatattgatattctgtcatttagtaagatttcttttattattctctaggtcatatctctatctatctatctatctatttatctatttatctatctatctatcatatctgtatgctgtggctccccaatatggctgttagttgtagaaaggtaggagtgtaatctgtatattgtattttctttttatccctatcagtgtcttgtacagtgttgagaatatagtaggtacttgataaaattttgctaaatcatatttaggttcgtgataactgagtttaatcctccaccaaataaatgagatttcgtcattagtaaatcaaattttaagtacaaagatcatttaatttttaaaaagttcaataattattcacttattttatctgtttttgactataaacagagcattgttcatgctcaaatgcttaactggttgaaagaagctcttcctctgacaacttcctgtcaaacggttatttaaaactctcaagtgtgttgctctaggagaatgacaccacggtgatttaacatgggatgatgcctaaacaatggatgacagaagagttattaacaggaagcaactatattgcagtgtcctcaaagactcctaaataacaggaaagttatcttcactcaactagctgcctggtaaagactgttgcctcattaacaattgttgcctcttttattttactgcctttatttttcttttactatactttgctgctgtggttattaaactgccaaagccagtatggaaggaggagctgtgttttggaacccagtgttctcatctgcattctccctcagcgagattttctgtcatcaaattagcctagagaaatagcatgctgattaaaaataagctttaagttccattgaaagctagaagtctattatttgcctagatccaggcatagaaaggaagacactcaatataaaagaattaccagttacattctgatttccattgtccttttaaagttaaattatttaaaaaatcttatagcagaaaaatggcttgaagtaggttttatctaataacttaggtggataaacaaaaaaaatcaatttgatcattattgcccaatattgcgtcttatgtgcagaactttatattactataaaaatttattttagtattccttccaagtatccactgaaagagctatatgttttccctccttccaccttcagcccatgaagacagatcctattttctcaaataatttcttaatgtttaatgaataattaaactgaatttcaaatatgtaaagagctaaagagatctcatgagagttatggacagaaaccaccatatgtaaaatgcaaaaaaagattaaaatttatcaatggagaatgatcaacactgaaactgatgatgcccacttatatattttttagaatttttagaaattaattgaattttatacttgaaaaataaggatttgtaagcaatattaagcaatagtgaagtttagctctaggtttagaatcagagaaactgaatttgacttctagtgacataatctcttaccaggtgataggttggtcatgtgatatctttttctgattcttaataatgaggataatgtcattcttacttttttcaccaggtgatctttcagaataagactgtgaaagtagtttgtactcataaggtgctctagaaatgtaagttattatttctcccatatctattgctatataaactgtgcactttaaagttttatctatatggaataattctaccctatgagaggggctcccaacccccgggccacagacctgtaccagtgtgtgtcctgttaggaactgggatgcacagcaagaggtgagtgagcattactgcctgagctctaccttctgttggatcagctgtggcattagagtctcataaaagtgcggacccgattgtgagctgcgtatgtgagggatccaggttgcatgctccttatgagaatgcctgatgattgatgatctctgaagtggaacagtttcattccaaaaccatccctccactgtcgcctaggtggaaaaattgtcttccaggaaaccgattggtccctgctgccaaaaagattgggaactgctgccctatgacatctaagaaagcaaagctgtttagaaagaaaacatagtagtttatgctgggcactagctatatgctaggcattgtgcaagcagtatttaacttcatcttcaaaataaccctctgagttagggacacaattatatccggtttacaggtgaagaaatataagcccaaagaggttaaaaacttgcccaaatcagggcataaatagtagagtcagctgcatcctagattttctccaaatgctgtccccttccccaccatattgcattggagatcttttctttcatcacaggatttataaaagcaaaagtccacttcagggaggagccaacccccttgataaagacatgagggggacttgcccatcaacaaagaaggtgccagatgcttccctctcagatggccctggcagcatgcctgttccataaattgcctcagtgaggcttctgctactacatccctttattaaggcctttctgtgattactctgctgctttctttccaatctctcagataaaagagcaaataagcagatgaaaaatgcagtctaaaggctgagttagaaagaaactgcactatgagaagcagggaaagtaactaatattttctaagtcactgtcatgtctctgcttctaagttgtcttaatccattcacaacaatttcctagagctgtattattattaccacttttcacagaatacatttgcactcaaaaagattaggtaatttctcttggaacctggtttgattcaaattgtttccaaagtctccctttgtgttattacaatagaatgcaaaacaaggaatgaagtacagtgtaagttattcattatcaagagggcttcgtcagtcccaaaagggtaaaacattgtttcacggttgtcttcatctgtttggattgctacaatgaatatcacaaactgggtagcttctaaacaacaggaatatatttctcagagtactacaagctaggaagtccaagatgaaggcactggcagatatggcatctggtgagggcccatttcctcaccagacaccttcttgccatatcctcacctagtcgaagggctgagggtctctttaaggaggactgttttataaagtcactaatcccattcatgaggactccaccctcatgacctgatcatctcccaaagtctcgactcttaataccattacagtgggttaggatttcaaaatatacattttggggaaacacattcagaccactgcaatatctaaaaatctttctcttgctatgtgtaaggcatagatatgcatatagcacataaacaaatatacagtatacatggggtattaaaatttcattggagaggtgattaggagaaaacatttgaaaaagctttttaggaggacaaggatgaaaaaaggctaagaaacacaggtgtaaagaaagaaataataactaaagtgaactaaacttgcagggattttggctctcatcaaggtccggacgaggtgcatgctgtttctccactgcgtcagccatgggagatatcatcgtatattttagagcacatgaggcaaagttgggggcacttctcaaaacctggtgaaattccatcgaatccaatcaaagtccagaagaatcagcactatttttctttctttctttcattctttctttatttttattttattgattgattgattgatttttttgagatgggatcttgctctgtcacccagcctggagtgcagtggtgtgatcttggctcactgcaacctctgcctgccaggttcaagcaattctcctgcctcagccttccaagtagctgggattacagacgcacaccaccatgcccagctaatttttgtatttttagtagaaatggggtttcaccaagttggccaggctggtctcgaactcttgacctcaggtgatccacctgccttgccctcccaaagtgctgtgattacaggcgtgagccaccatgcacggccgaaagcactacttctaaactgttaaactcctagaatcaagcaatcctccagcctcagcctcccaaagctttgggattacaggcataaaccaccatacccagcccaagttattttcagttaaagaaacacagagaaatggtttggcccatgtatgggcaaaccaagtctttgctgtgctcctctctccacacacaacgttctaccatcacatcacaacctgcctttcattctttcatccgtctcccaggatggagtcagcccctagattcatgcctcaaaaaatccttgatttctccacctcacattcttcttttgcctcttggaatgtcccatgtctgcacagagtgtcgtacagcccagacactgcatttacaaagacctggatttgaattctgactctgcaatgaatgactgggtgcaattgatatatcctcttcttatgcctcagtttttccttatgtaaaatgggactactgatttttaccttatgagacagtcatgaagagagaacatggaagccatttagcactgtgtctggtcagtagtaagtatttatttgatgttaatataccaggaattttgacaactaagttattctcttcttagatctgaaacaatgtgtatgtgtattacatatcaaacaataaacatgtgtgagccatgaaaaatcataactcagatgacatctccttcaggaaatccacatccatatccctgtctcctctcatctacctctgagctggtatacctttcttttgttgtgttctttaaactgtgttataaatggtccgtttacgttctgtctctttcattaggctgacttccccgtcaaaaaaaattctgccttatgaaatttcctatttttactacctaaaataaaggtttttcataacttactgttaaatgatgaatgttggtgatatgtttccactagtttgattacctgtgttgcatggatgtagcatatattttcatctttgtcagaaagaattttatccctgtatcttaaagctgggacaaaaggccttaccattgaatacaatcttacttctgttgatttaaaacttgactatatatgttaaacctcttaatatagagagaggtatatatgaaatttatcttaaaccataaaaacctacacagtttatacttctttcttatttcaggatgttttctcatttattatcagtctgtttcatataccatgcataattccagggagagacatgcaggaggtaatttctttctatcctttcttgggcttcacagctaattttagcaaatgcatttggcaaactttttgtagaggttcatagtatttattttgcaatttttcattatgagtttcaagagcacaaaacccaaatatcagggagaagaatgcatactgatatcagacatgcagtgttcactagtagcccttatctactgaatcgtaacagcacttaatcttataggtacatattgacagccaatttatctaattactcacattcacaaattaattggagtgataacaggatatattatcctcactctgacatgtttttggaggtcttcagggagacttatttcttgaaacaactgaactcttgaagtcgtttaaaaggatctgatttataatcatggcttagaacgtatcttcattcccttgctgtcctttttttttcaattaatgaagatacttcaattagaaagtcatacagctttgttggaatgacaatgtgaaccttttcatggttaagctcaatagccaatgttacaatctacacttctttgagatttaactaaaagacatattcattgattcaagcaaatgcgtgttcttttcctagtaacactttcttctttatcctttgaaactccatgcaaatgcaaacatcactttctcagaagcctttctggactccttccatatgtgatgaggttggaagcttcttctctgtgttcacctggaactctgtgcatgctgggcacattataccatttcactgtgatcttttatctcttctgttgttaagcaacagatcaaggactgttgcctggcacatcttacaggataggtactaggtcagggaaaagggataaaaatcagaaaaaaggggacctttccttgaggaatcacattttactaggaaatacataaaagtaaactagcaattaaaattaaaggttaaagtctatgaccaagatattctttgttgttgttgttgtttgtttgtttgtttgttttgagacagggtcttgctttgtcccccaggctggagtgtagtggatcctccatggcctactgcagcctcaacctcctagcccaagccatcctcctacttcagcctcccaagtagctgggaccacaggcatgtgccttttttagagatggggtcttgctatgttttccaggctggtcttgaactccaggaatcaagcaatcctccagcctcagcctcccaaagtgttgggattacaggcatgagccaccacgcccagcccaagatattttcacagttcaatgaatgcaaagggcggttgagaaatgactttgcgttggtgcgggtttttacaaggatcaggttttttgggctattagtttgtttgctatgagagataactccatggatatttctgatgtgctattattaaattacacatttaaaaagatagcttaatagcaagcacctgagcagctaatacttttatattctaatgtgtcctcactgtgtacatggccatttgctttcactatatgtaatttttaaaacgtagtttaattcaatatttcctaaacactaactataagtgtgttaattgctgtgaatgacatgaggctgagtaaatttgtcatcttgggaacttattttgagctggaccctgtctacataataggtactatactagtatttgtcctaggccagattatttaattcttgtgaagacacggggaggaagatattatcatttctatttcagagattagaaaattgataatcagaatagttaggtaacttgttcaatgtcacacagctgagaagggggtagaacgagaactaggatcctttcacccaagcctggcttcttgttaaactagtatatggtttcccagaggagtcaccatgctatctagtggtggaagataagacatgaacccaagtggccctgttataagaagactgtcctaaaccctgaataaaccaagaacattgacatttaagatagaaaaatccataaaggcttcatgaagaaggcttcatgcaagaaagtgggaaagatttcccaaagacacggtaaaagggagataggaacatctaacataatctatagtatctatacttctgacaagtttcatactgaaaaataagtaataattactgtactctgaatacctattgtgatttcaattataatcaatattcactgaatgactactatgcatctggtagtgaatgaagctgcattatcttatctacttttcattacgagctacgaagtagatgttattgtatctcattcaatatatgaggaaactgaggtaaaggatttaagtaacttgcccaagcctcacagtaaaataaactgcagagctagcattcaaaacactgtattacttgacctactgttaatatttacgaagtgcttatctctgtgtcagtcccataataagggctcaataataagagttgctaccatttattgcacattattacaaaaggcatgaaagcaagactatgtacaacaatctcaaagaagtctacatggtcgtttttgatgagggattggtgttgggaggagacatgtgggcaaaggcaagttgggagcacaaaagaagaattttcaaggtcagaaagcatttgaccttgatttgagaaacgactatcaaacaacaatggtgttacagcaggccagtaacctgtagaacccaacttataaagtgcgcatttaaaatgcacatttgaaagtgagagatgattgacctagacttggaaagtgattgaacatgagctgcaagggggaaggaagattaaaagatgagttttggggaattgagcttaggtagatgagtgggatatggtggtagattaaattaaatacaaggcaaagagcaataaaatcagccttgggttggggctgggtcaaaggcatggaaggaattaacagaaggaaaatgacaaccctgtttggagaaactttgatttataggagccaatgtggtgtacatctaatgatgttcagcaggttgttaaaaatatgtgtgacttagtatagcccatgagagaaaaggacagggttaattatatagattttgaaatgatacagaactgtgcaatattgctcactaaattattactcattgtgtccaaagtagcttttggtcaccatccccctgtatagtttttttttttaaatttatttatttatttattattattatttttttagacggagtttccctgttgttgcccaggctggagtgcaatggtaggatctcggctacccacaacctccgcctcctgggttcaagtgattctcctgcctcagtctcccgagtagctggaattacaggcacccgccaccatgcctggctaattttgtatttttagtagagacagagtttcaccatgttggccaggttggtctcgaactcctgacctcaggtgacccacccgcctcggccttccaaagtgctgggattacagacatgagccactgcacccagcctgtatagttttatttatttatatttggtgtgctttccagtacctgaaattatgtacaccatatacatttatctttatttttattatcagtattcttcatttcattattataaggaatttatttgacattttcatcactgtatttatagattctagataaaacttggcatattagagggcattcaatgcatacatttcatatgaatgaatgagtatataaatcaatgggtctcagtttttatatccctaatgtaaaacacacattctttatcactaataggccattgatactcctaagaccatgaggaaatctatgcactatctgctcagaaaaaggcacagacactgcaatttctcatatacgtacaaaggattcacagacatctcaaggcccatagattcatctagaatttgagatgcaaagctatgggctcatccagcatttctctcactgtgaaccttgagggaaacctaaacttagggattttgattgtttttataactgatttccaaatatcttagtaaaagtagtgtgatatatatatgtgggagtattaactctggtttctaccctaaagcatgtgggtgtttgaaatacccaaattgggagttcaaattccagagatggctattgcaaatcttgacaatatttttaggacttctagaaatattataaattcgtaaatttaatcaatttataatattgataaatttaattataaattgataaaattcattggttttaaaaactgtggttggcttaaatgaccacaaaagcaacaaaggttgcttttgtgaacaaaatatgcaacccagcaaacccagcagccctgcgttctggaaacaagctctgtggctggggttctgatgggtccatgtatggaagatctctgaaacttagctgtgtgaaaggtaagctgaccctgctgttagaacatgttctgtccaccacagggataaacccttcctgcaaggtgctcgtcaaaaagcctaaatgacagagattggagaccccactgatgtcacagaaagaatggcttgatatgcacatatttgtttgggtgtgtgtgtttgccaaataatgggtggaattattgggtctgatatttgctttcactgtaacataaagagaagaagatttggttaattatatgaatttttgaatgatccaggtttcatgtcctataaagcccaagagcaaagtaagaggtcaaatagccttcaccattcactaatggttaaagcttacaaatccttgccaattatacattctcaaattaacctacattcatttgcaactggttgagagaagaaaggggacacgattaaattgtaaggagacctcagagaaatgggaggagagatagaaaagcaccacaacattgaaaaaacagcaggaaggtttcaagtgggaaggtgtttggtggagttgacaaatgcttcatactttgaaacatataagcactaaggggaaaactttagttttaaaattagagataaaattgattccttttaagaaaaaaaaatcaatagaatggcagtggagtggaaattttcagaaaaagaaatattaaaaacttactgagttcttcttctgtataaaatactgtgtcaggttttgttaggagaacacaatatataagacagattttctgaattttaacaatatttgaattggggatttcttcaactgcaaaaggagatgttatgaaaaatagtgtccaagaataatgaaacacaaagaagttattaattatttgtttggttgctttttcacttattctgttctaatttatttattttatccagtttattcaatctccttttggtaaagtcgtaccaggttctccctttaggtaggtgcttatactccattttcactatatggctagtacagtgactatgtgactatgtgatacataccaccagctctaaccatgggcacaaattgggttgagacaattgatataatgcttcactgataataattgattaagggatgaacctatggctaaattcagggcaataagaacgaggttcaggaattctattagatacctaaggaatagaagttctcacacaccggggcctgttatggggtcaggagacgggggagggatagcgttaggagatatacctaatgtaaatgatgagttaatgggtgcagcacaccaacatggcacatgtatacatatgtaacaaacctgcacgttgtgcaaatgtaccctaaaacttaaagtataataataaataataataataataataaagaagttctctttttttacagttgataggaggaatttaggttcaaaactaaaccttttttgtgctacttgaggctgagcctagaattcccagaggttctcagtctgaaacacagaatcaaagaagaggggaaacaggaattaggtgacattattttagctgctgaattaagcttcacctgaagcttcacttttagtttctaaaagtttagaaatgtctttaaacttttcagctatgtgagttaatatattctcattgttattgaaaccagtttgatttgaattttttaaacttgacattaaaaaaaagtcctaatggagaaatgtctttcagagattctggaaaagccaaggtagggatgaaagtttatgaaggcaaacaatgggctaaatctagaaaaataggttggaaccagcaataaagagccctccaagcctccaaggtatttaaattagctacagattgggcttttaaataattcatcgttcattcctctgtgctcttaacacctgctccttaggcctccagtggttactgatgttgcccagtcatggattacagctcattgttcaaatgtttcttttatccactagattgaatgaaaactcctccagtttttttgagggcaggggttattttttactcaaactactaacctcacatctcctagcataatgcctgttacatagtaagtagttgtagcagggaggaatgaagtgagaacatgtattaatccgttttcatactgctataaataactgcctgagatggggtaatttataaaaggaaagaggtttaatcgattcacagttcagcatgcctggggaggcctcaggaaacttacaatcatggtggaaggggaaggggaagcaaggcaccttcttcacaaagcagtaggagggacaagtgcctagcaaagaggggagagccccttataaaactatcagatcttgtgagaactcactcactatcatgagaacagcacaggggaaccgcacccatgattcaattacctccacctggtctctcccttgacatgtggagattatagggattgcaattcaagatgatattcgggtggggacacaaagcctaaccatatcagagcatcattttggcaactccactctggcagcagtggattgaaaggctggaatgaaataaaaaggaatgagaagagaaggtatgcatttcagtatttcagagagaatggaaaagggctcagagaaataactcaagaaaatgctacaatctgaatctaggcagccccatgaataaaatggagatggccacacgaataagttttcatacagtgatcctttttcctgttcctgttcttttttattcatgtaaagttctgaaaactgttgcccatggtaacattcagtggaaagctgaccagtatttagacacatctatcagatcaaacgttgatgaaaaagccctgtatctttcttttttctagagtcagttctaaatatagacaggatgggctccttagagcaatagaagtgactaacattgagttgcagtattgacaatgtccttttctcccctaaatacaagcaaatttgaaataaaaaataggataaccccaaagagataagtgttttaagcatgccagatattttccagtttttgttgtattttagagtgttgatctcgcactttctgccatgagagcaggatgttcagtaaaaagaggaattagcaatcaaaggaagcactggtcttaaagaagctttaatgcatttgagtaagagatattactttctagagtaaactttagaaataggtccagtatacattgtcatagctgattgagaaaattttctaaagactcagtcttagaaggcagcacatacctcaccctatttataaaatttctttcaattttataaatgttaaggtaatatcctattacttcagaacacttggaaaatacagagaaaaaaacacaaggtgttttactcatgatgtaatctgttcatgcaactactgttaacatgtttttaaatttttttctttagaatattatttacttaaacacaactaagtaaaattttttacactctgtgtctttgcttagataagtcttccctgactttcaatttgtaattttatcccttccctgtccccactattctttttccctagcatgtttgtttttgctttgtagaacttaacacaatttttaacagtggttgtacattttttatgccagtttttcacataaggacagaatcacagttgtgttttgcaatattgcctacccaacaggaggcaagttgttggcatatagcatgcacagaaggtagacgactaaagttttcaggcattgtggtgcagtggtttaaagcagcaggctctgcagcctggcttcctggatttgaaccctttgagaaaggcagaatactggcctcccaaagatgtccacatcctaattcccagagcctctaaatatgttaccttacataatacaaataactttgtgagtgtgactaagttaactatctcaagatgaggaaatcttcttaggatatctgatgggtccagacaaatcacaggggtccttataagtgggaggcaagtggggcagggtcagaaaaaggtgatataatcctggaagcagagagagagcaagatactggaaggggccatgctgctgactttgaagatagaggataaggccacaagccaaggaatgtaggtgactgctaagaatctggaaaagataaggacaaagattctaccctggagtctccataagaaaccagccctgctagcttattttagacttctgacctccagaactgtaacagaataaatctgtgttgtttaaggcactatgcatgtggtcatttgttccagcagcaataggaaattaatatgcctgctttgcatatgaatcgtctcagcagttcaatcattctctctgtgcatcagtttcctcatctgtaaaatgaagaagaaagtggcacctgcctcacagcatagtttaagtccataaatactgcaaagcatgtagaacagtgcttggtatgtcccatgttatcaataaatattaattgctgttgaaagtatatattatcaaacaaacaaaatgacagtcagttactcctttctaattctttaatttaccaatgcaatctatcggtgttaaatttctcaatctttcttacttagttgatgaatagggtgtgtgtgagtgtgtgtgtgtgtctttcttggtatcacagtttttaatttgactgtttagttcatctgctgggaggaggaagagcccttagtcatctttgttctgtggttcacctttagccgcccactccttgcccacattggaggtcacggttgaccctataccagctcctaaggccacctgcttatcagccgaggaatcttctctagtcaacctcacattctttgcatttgggaggaagaaaaaggtgattgcttttattggcctacatctggattccctctttctctctgccttgcttttcagttacctcatcctcagttttaagaatctgcccagcccttcaagatgatgctttgtgttgtccccgtctccatcagtttgggttgccgtaacaaaaatatcacagaatcggcagtttaaacaatagaaatttatttctcacacttctggggactgggaagcccaaagccaaggtgctggaaaattctgtgtctggtgagggcctgcttcctgtcttgtagacagccatcttcttgcagagaggaagagagagcaatcctgtgtttcttcttttttaaataagggcttcaatcccatcctgagggccccaccctcatgacctaattaaattacctaagccaacttacctccccaaagcctcatctcccaatgccattacattagagactacagtttcaccctatgagtttgggttggacacaaacattccacccataacagtccccttcactctacagatattcccccatggttctacttacaatttttcaactgttttttttttttttttttttttttttcagatggagtcttgctctgtcacccaggctggagtgcaatggtgccatctcagctcactgcagcctccacctcctgggttcaagcaattctcctgcctcagcctcccaagtagctgggattatagatgcgcaccaccatgcctggctaatttttgtatttttagtagagacggggtttcaccatgttggccaggctgctcttgaacttctgacctcaaatgatccaccctccttggcctaccaaagtgctgagattacaggcatgagccaccacacctggccccaatttttcaactttacgatgatgcaaaaccatcacaattttgaggtaatgtacagtattcaataaattacatgaagtattcaacaccttattataaaatagaccttgtgttacatcatcttgctctagtgtgggctactgtaagtgttctgagcatgtttaaggtaggctatgttaagctatgatatctggtaagcaaagtgcattaaatgcatttttgactaatgatattttcaattcacaacaggttttttggggcataaccctattgtaaattgaggagcatctgtatttaacacctccagaggttactgatgccctgatcctttatccacctcaggtattcaggttttcatattagtgtcctgattttcatttttaccaggacagtagtcctcaggccagtataatacaaacataaaaaggaagatcctttcaacctaaattttgttaaactcaggggtttagagattgtcttgtgtttgaatttgggctccacaactcttttatccacagggagaatgacgatataccccatattacctaagacaatcccaatttataactatggatccatagttatggatcaatatagttgtgattataactattgtaattattaatggcatcccctgttactcttagaagtatcctggtttttataataaattctataatcgctggatttttgatgttgaatgagtccctttattcctcatctgtaaattacaatgatgacactcctcttataggatgctgggtgcagtaacatgagcaataatcatggtgcatagcagatgctcaatctaggttagattcattgcttttaaataatgactgagctccctaaaaccaagaagaaaaatggagccagactggggaaaactgaataatttgatttggaagaaggtatttaaaagcagtatttagttggagacaagataggcttagtcaacttgccaacggcttaatgccaggaaggcccagtagggtcacagaatctcagaaatggatgaaaccatacttattatcaagtctcttccccctgctcatgcaaaaagcttcaacaatctgtgacaaagccatcacctaattattaatattaatggctaacatttataggacatggtgctaagcaccccaggtggattaccttaaatcttcttcattcgaactctataaggcagatactgtgattgcctcactgtagagatgaagagactgatctatggttgcatgagatttgcaagttcatgtagttagaattcagtatcttcattttgggtggctgaggcaaagggattgtttgagggcaggaagtcgaggccagcctgggcagcatagggggagggagggggggagggagggagggagggagggagggcgggagacagagagagagagaaagggagaaagagaagagaggaaagaaagggaagggaaggaagggaaggaagagaaggaagagaaggaaggaaggaaggaaggaaggaaggaaataattcggtgtcctgcctactagtgagcttttggttgccacataggattttgatgatacaattatgaacgtgaaatttgtatttgaggagttcaaaatgcccttaaaaagtctaaataattgacaagagtttctttattgtaaaggatgctttatttttatggattttatttggcaaatgttacttcctatttgctactagttttttaagcacaatgaaatgctataatatcttgaaacatagggaggacttctgtagttaagaggcaatgatgaaaatgacacattggatactttttccacaacaatctactggtttcagggcctgggagaatgtgttatctattgagaaatttacaatgcaatgaatggatagttaacagaagcactgaggtgtagtgaaaattgttcagggtttcacagacaaaacaacttaattcaacttgatgtgaaatagctgactgtgtgaatttgaaccagtaattttttttttactctgcaccttaggtaccctttctgtaaaatggaagatgggctagattattaacaccttttcaagtttgaccagcctctgattctctgaaatacagcctagattccttgcaaattgtcagtttggcaacaaacggtggtgcttagaaaaagctcagggcattcagtagaattcaattttatatgtcacagatggaagctaattgaaattatgtaggtagatcaagtgtaacaacaaatgcttgcaccagcatgtagcagacctttagcccagaactgcttcagtctgtcaacagcactgagcatgttgcagtaaagttggtaatcatctgtctttcttacagaaagtcattgctgagagcagagttttgttgggtcaaggacaccaggttgcttattttgaaaggaatcatgctcagaatctcgcaaaccaaaagcacttttccaattctgcattaatagatgtttaacttggcccagagcaggagcaacagtgccaaaagggaagcatgcccactaacaagactggactgtggcctgagactttgaagacttctagttttaacttccccctgtctgtatcttgagtgcctgcacctccaagagtttttttgaagcatgcaaatggtctgcctgctctagctccacttcatggctcttctctcttttgtggcatctaatgaggattacctcttgctgcttttgcctgcttgtgtctgttcatttatcttaagttccaggactgtgacttctgcccaagtggtcagcctaaaactgctctctccgcagttaaaaaacaaaacaaaacaaaacaaaaagcaaaaaaccaactagttatcaaaatcaattccattctagttatttattgattgcatgtagtatgctctacactatgcttgaagctgggggttcagaaaggattcagatatatcccttccttttccacatagagctgacatactcctggaggagcggacagatcaactatcctttatgtcaggagatgtactagttttatagaacagagcttctcaaactatatgtagtgaaggatcagttttgttccttattttttttctgtccaattcattgtacagtgatacttttgtaaaataaaaaataacacttatgtgtactgcaacaatatcacattgctgcgattgcttctaaatgcttacattcaatttctgcattttgttgttgtgaatgagtaggcgacaatttgcaaaacagcctgatgtgatttggctctgtgtcaccacccaaatctcatcttgaattttaacccccagtgttggagaaggggcctagtgggaggtcattgaatcatgtgggtggacttcctccttactgttctcatgatagtgagtgagttcttacaagatctgatggtttaaaaatgtgtggcacttcccctgttgctatctctctcctgctctgccacggtaaaacatgattgcttccccttcaccttctgccatgattgtaagtttcctgaggcctccagtcatgcttcctgttaaacctgcagaactgtgagtcaatgaaacctctcttcttcataaactacccagtctcaggtagttctttatagcagtgtgagaatggactaatacacagccccatcctgcagtcaaccactcaaggcagcacttgactgaaacagcttaaataaaatgctgttgaaacacacatgagtacacagttcatcccctctggggtatgagctctatctcagggagaaacaccagggaatatcttttagttctcttcttccttcatctttgcttcattcaaggccaacaactacctccatcttccagtccggttttactttgcttcgatcagattgcactaaacctagtgttctcctcccttccatataacacttttgttcttttgttaatatcattttctccttccgcttatccaatcacactggttcctcagcctggtgctgtccttacactctacactgactccttcagacttcttccaagcccgttgtgatcaggtgaagctcttcacacaaaggcagatagctctgaacacaccattactctgttacactcctggaatgtctgtgcacggtcactcaaggcctctttgatctaattctcacctaaattttcagttgttcttcaccacaatgattgaatccatttgcaatgctgcactgaagctgcattatttgctgttttccacatggatcctggacctacataccttcatgactataatcatgctttttgccccttctgccttaaaacttaccccacatcatcatcatttcccagtgccctgacttgccccactcatccgtcttcacaaataatgcctattccttaatacccagcttcaatgccacatctatcgggaaatattctctagagatcattccacatttgtaataatagctcaatctgctaattcccaatgtatttcattttgcttgttttctggcactaggtagggattgtctgtcttcagctatggtgatttgtaggcacatcacttatcatccatgtaggctctctgaggtcagaattcatgcattacttactctctgtaagtgtctcacacagtgccctgttaatttgattatttattcatttgcaaacacagacgtttttgaacctataatgtgctgttcacatcttaccaaccttataagaacttatcatctattgggagaaatcggataacaaacatagttatcaagctatttggcaagtgcaaagagtgttttgcactgcataatacagaagatggagagaggatgcacagccagcaatgcagatgaccatgtgttcagggagtgtttctttagaaggcatcattggaggcgagagtaaaaagatgagcaagcccaagataggcacctcatagctacctgattgctattctatttgatttgattcctttgcacagttctgagagtcccactcagatttcctctctgagtcttcttcgcatacttacaggcagctgtaatctacttgttgtatacagtttacagtccatttaaccaaccagaatttcaaataaagcagtataagcaactgtattgggttaaatagtgtccacccaacattcatatctacctggaagtcagaatgtaatcttatttggaaatagggtgtttgcagatgaaattaattaagatgacctcatcgtagatgaaggtggtcaaatccaatggctggtgtccttataaggggagggagatttgaggatagagagacacacatgcaataggaatacagcctttggaagacagaggcggaaactggagggatgcagctatcagccaagaaatgccaaggactgccagaaactcccagaagctgagaatccaaggaagaattctctcctggagcctttgtagagttcattcccctgcttgtgctttccaggtttgttctcagacttgcagcctccagaactatgggaggataattattatttttaaatttaatttaagttccaggaaacatgtgcaggatgtgcaggtttgttacataggtaaacgtgtgcaagagtggtttgctgaacctatcaacccatcacctaggagttaagtcccgcgtgcattagctatttatcctaatgctctgcctctccctaatcccctgacaggagagtcaggggagtgggggaagggagcatgttgttcccctccttgtgtccatgtgttcctattgttcagctcccacttataagtgacaacatatggtgtttggtttttctgttcctgcattactttgctgagcataatggcctccagctccatccatgtccctgcaaaggacatctcattcctttttatggctgcatagtattccatgctgtatatgtaccacattttctttacccagtctatcatctatggacatttggcttgattccatgtctttgctattgtgactagtgctgcaatgaacatacaggtgaatgtatctttataatagaatgatttatattcctttggttatatacccagtaataggatttctggatcaaatggtatttctggttataggtctttgaggaatcgccacattgtcttccaaatggttgaactaatttacatttccaccaacagtgtaaaagcgttcctattggggaataaatttatatggtcttacgccacccaatttctgggaatttgttacagcagtcctaggaaactaatatagcagcctcaagagataatgcatgtacatcctcattcttaatttggcctgactatcatagaaatgtcttctcctttattgtcctagatggcttaatttctacagagcgctctgctgattttgcacaaattggaggcatgccaaaattctcttaaagggctatgaatttattcttattttcttaatgcaaaaaaattaagtaaataactatcatttaagttaaaaatattgttttatcacattttccaagtattaaaacttttacattctttgtatctatgtatgttcctcgcacaaagttgttccaggttcagtatacattttgtcaaattgtacccaaggtgctatttcccaaatcatattgcttaactgaatgagtagcgttacttttttatggaaaatatccaagtttgtgaatatgtacagtaaacatttttattaaaatacattgtaaagatgaaagttctaatatttcttaaaactgtgccttggtattgggttggctcttttgtaaaaaaagaaattgaaattactccttttctggtagtagtaggagaccattgggttcttctcagtaggcttatcatatacatttacaggaatatttgaaatgataaaaactctgtttagaaatttctgcctattcttgaaaacatcactgtagcattcatttcatttgataaagatgtgaagccatttgtcaggaggcaagagagagggcggcaaggaacttgaaattgcaataacattaataatttgtggaagctttggtctatttattgttaatgttcaaaccttgtgcacagatgcctgactttcccaatctgtggtcaatgtcaagacatagataagtgcatgcactcaatcagaggaagaaaggaagctggccgatagacaagggcacacataaagtatatgaacaggttaataatgctttctttaatcagctggaattaactgttctttaccccgatgcttgtatttgacaggcggccttgattcaccactgccgataaattgctgggtagaatgaatgcctcagtgctcaggccctgtcatgtgttggagacaaatgtttttgttcatttccctggtaagcacaggtacaaattccttaacaaaggctttaactttaatggtgtaaagtatctgtgtcactctgaaaaaggtgttgtgcacacagaagagaaatgtaatcgatttgttgagttaaaaaaataaacatatatcatgctttaattaagacaaaacattttaatctacctataaaatagttctttatcaatgaccatattgccatggactttatcattgactatacagataaaaagaaggaattcaataaaagaaattgttcaataattgttaaaatgattggctactgggactatgtctaaaataggcaaaatatgtccaaatttaagaatgatttttacatataattcaataattttaatgtatatcaattatgaacaaaatataacttattcaacaaattattattgagaatttactatgtattagaacacttccatagatctgggatttaattcattgctgatgaaattatagaagaatttatttcattcatttattcatatgttcactcagaagcattcttagagcacagaccctgtgcaaagcgttaagagttattcttgccttcgaagaaatttcccagtctagtacagaagatggataagaaagtaattagctaaaatgcaatatgatgtatatgtatatgaggtgcaatatgatatctgtgtacagaagtatcatatatgagatttggtgataacagcacagggacagcagagagaatgaggggattaccgaatgtaggtctgagtgaaaggaccaagggaggtggagaggttcactgagggggcaacacttaatctggaatttgaaggatgatgaaaactttactaaaagaacatcagagacaagaagcattccagtgagagggacaatatgtgcaataaaagagaaacaggaagcaggaaaacgggtcacttgctaggttgatattactgatagtaaggtgttagccaaactggcctgaaatgcaaagaacagagaaataagcaaagatcaagtaagacaaagattgggaaatgtccactgagtttgggatttaagttgtcactgatgacatgtgaaaaagctctttcagtggggtggaaggaactgaagccagaatgtagtgggtggtgagattgtatgtccaaggggggaggcccaacccacatcacctgaacacaaacgatgtctactaaatacttcctcactgtttaacagatacatccatagtattttaatgtaaatacaagaaagaagataatacgaggcattaagaagcaagggtcatagtttgggggagatttctgagtatatttatagaattgttgccagggaaaaggtagagggtgaggattcagaagagagagaggctgaggctcaaggaccagagcccaggagaggtggttaaaaaaccaaagaacaaagatattaaaaatgctggtagaaagataaggcttgaagcagaaagaacacatttctttctcagtctgttcatcaagaaacatttataggacattttctatgacctggggactgtaagatttcttagagacattcataaatcctacctcttgtcactatgcttctaccttaatccactgaccttcaaaatatttttattacattaaaacattattatatataatatagtatataatataattattatatattatataatatatattacactatatagtcaatatgactttgagatatccataactaatatatatcacatataactaatatatattatatattatgtaattatattatataaatattacatataacatatataacatatattatataacatatataacatataacatgtataatatataacatatataacatatattatatataacatatataacatatataacacataacatatataacataacataacatataacgtatattatatataacatatataacgtatattatatataacatatataacgtatattatatataacatatataacgtatattatatataacatatataacgtatattatatataacatatataacgtatattatatataacatatataacatatatataacatatattatatataacatatataacatatattatatataacatatattatatataacatatataacatatatataacatatataaattatatataacatacattatatataacatatataatatataacatacatcatacataacatatataatatattatataacatatactatatatattacatataacgtatataatatatattacatataacgtatataatatatagtacatataacgtatataatatatattacatataacgtatataatatatattacatataacgtatataatatatattacatataacgtatataatatatattacatataacgtatataatatatattacatataacgtatataatatatattacatataacataagaatatatatatgttatatatatattttagtcagaccctcactgtcacccaggctggagtacagtggtgcaatctcagctcaccacaacctctgcctcctgggttcaagagattctcctgcctcagcctcctgagtagctgagattacaggtgcccgctaccatgcccagctaatttttgtatttttagtagaaacagggttttatcatgttgtccaggctggattcaaactccagacctcaagtgatccacccgcctcggcctcccaaagtgttgggattataggcatacgccaccacttctggccatatttttttaacgtataaaataaaacatataaggttaaaaagaaaaccaattatactacaaagcagttatcaaaatattaaaaatacacatgtagatcaggtcttataactactataacataaaagtagtcaatataatgactatttgagaaatccgtaactaaacatatttcagtgtctattggctatgaagtcacaggtgctactaataatactgtggtttgttctctacattcacaattaaatgatatgctaaatttctgttgaggttaatgaaaataaagatggcatgctctttgcacttaggtttacagacccctgaatgctctgatccacctacccaggataaggctcctgtgctgatgggagcttgagaactggctcctggctctctctctctacctcagttcctccactcttatgctcacacacctcattctagttacctcagccttcttcccttttgtcaaacatttggcgagtgcttctgcttcagggattttgcatctactaggctttcttgtgtctacaatgttctccccagatatccatgacttgcttcttcattgtgttcaagtcctcatcaaacgtccctcctcagagatgccaacttgactggcttatagtatgacccactccgtccttctctactcatttaccatgctatatttctcttgacaacactcatttacctaacagcgtatcataaactgtcagcttatttggttagtgactcccctactaggatgtaacttctatgaggcaaggatttctttggcttaacaatatcacagtgactgtcacatagcaagggctcagttattatttgttgaaatagatcatttcaactggctatggaaagtgcttacatgtgaggcatatccattatcctggggcctcagagaggaggaagtactgcttctaggagaaggcattgcctaggtacagtcttgagatcattagagattcaaggaaaggagaaaattgaacatatcagttggaaatatgtataggttctgacctagataaggtctaaagtcatgcttaataaaaataaatggccttgctgggcacggtggctcatgcctgtaatctcatcagtttgggaggctgaggcaggcagatcgcttgagttcaggagttggagaccagcctaggcaacatggtaaaatcctgcctctacaagaagatacaaaaataaaaataataaaaaatggctttatcagtcatactttaatggtcttaattttgcattttatccctactccctaaacttttttctttaaagatcttataagaagcaacccaaaataggcatatataaataatatagatggcaatgtgaatttcacataagcatttaggaagatgagttccattaacaaagaactggactggtgacatttgtataacattgtattgatacaaccactttacttttcataatgtcaatttcatttatttttccactaaaacatattacaaccattcaaatgaatgaatggaaatgcaacttttgagtgactccactgatttttcccccattcaaatggtttttggattcttatattaagcagtcttgagataagcttcattttatgctgatttagagagtgtttcaagatgaaatgtcagcaagccttatctgcaaacaccagatccaataagctatatctggtactaaaaatcagaaattgacacaattttaattagcctccagttagtgaacagatatttaataaatggtcacttcagcttaccttttaagatatacattcaggccgggcgcggtggctcatgtctgttatcccagcactttgggaggctgaggtgggtggatcacaaggtcaggagctcaagaccagcctgaccaagatggtgaaaccccacctctactaaaaaaaaaaaaaaataccaaaaaattagcaggtgcctgtaatgccaattactcgggaggctgaggcagagaattgcttgaacctgggaggcagaggttacagtgagccgagatcgtgccactgcactccagcctgggtgacagagggagactccatcatggaaaaaaaaaaaaaagatatacattcaacgggtacaaattattctctaaattacagccctttgtccttcaagagcatattataaaaccacagaaatgaacataaacagagaaaatacctgaagatatataacaaacggttaatcagtaaataattaattacgtactttcattctttgattctacaaagattacttgatgccagaacaatgctgggtgatgtgctaaggtgctggagatataaacgaaacaagttagacaaggtgcttgtctcatggagcttattttataacgagggagatgaataatgaacaaacacatatataaacgagttcaggcacttacaagtgctataaatacaatcaaataggtaataacataataatgtaattttggtccacatagatctccagtctcttagcgtaaagacaacttaatttaattcctggtcctatcaagccctcacacattaaaagtagctgcctgttaaagaagaaaagagagaagaatcaaatacacgcaataaaaaatgataacggggatatcaccaccaaccccacagaaatagaaactaccatcagagaatactataaacacctctatgcaaataaactagaaaatctagaagaaatggataaattcctcgacacatacaccctcccaagacaaaaccaggaaaaagttgaatctctgaatagaccaataacaggctctgaaattgaggcaataattaatagcttaccaaccaaaaaagtccaggaccagatggattcacagccgaattctaccagaggtacaaggaggagctgttatcattccttctgaaactattccaatcaatagaaaaagagggaatcctccctaattcattttatgaggccagtatcatcctgataccaaagcctggcagagatacaacaaaaaaatagaattttagaccaatatccttgatgaacattgatgcaaaaatcctcaataaaatactggcaaaccgaatccagcagcacatcaaaaagcttatccaccatgatcaagtgggcttcatccctgggatgcaaggctggttcaacatacgcaaatcaataaatgtaatccagcatataaacagaaccaaagacaaaaaccacatgattacctcaatagatgcagaaaaggcctttgataaaattcaacaaggcttcatgctaaaaactctcaataaattaggtattgatgggatgtatctcaaaataataagagctatttatgacaaacccacagccaatatcatactgaatgggcaaaaactggaagcattccctttgaaaactggcacaagacagggatgccctctctcaccactcctattcaacataatgttggaagtgctggccagggcaatcaggcaggagaaggaaataaagggtattcaattaggaaaagaggaagtcaaattgtccctgtttgcagatgacatgattgtatatctagaaaacctcatcgtctcagctcaaaatctccttaagctgataagcaacttcagcaaagtctcaggatacaaaatcaatgtgcaaaaatcacaagcattcttatacaccaataacagacaaacagagccaaatcatgagtgaactcccattcacaattgcttcaaagagaataaaatacctaggaatccaacttacaagggatgtgaagaacctcttcaaggagaactacaaaccactgctcaatgaaataaaagaggatacaaacaaatggaagaacattccatgctcatgggtaggaagaatcaatatcatgaaaatggctatactgcccaaggtaatttataaattcaatgccatccccatcaagctaccaatgactttcttcacagaattggaaaaaaactaaagttcatatggaaccaaaacagagcccacattgctgagtcaatcctaagccaaaagaacaaagctggaggcatcacgctacttgacttcaaactatactacaaggctacagtaaccaaaacagcatggtactggtaccaaaacagagatatagaccaatggaacagaacagagccctcagaaataatgctgcatatctacaactatctgatctttgacaaacctgacaaaaacaagcaatggggaaaggattccctatttaacaaatggtgctgggaaaactggctagccataggtagaaagctgaaactggatcccttccttacaccttatacaaaaattaattcaagatggattaaagacttacatgttggagctaaaaccataaaaaccctagaagaaaacctaggcaataccattcaggacataggcatgggcaaggacttcatgtctaaaacaccaaaagcaatggcaacaaaagccaaaattgacaaatgggatctaattaaactaaagagcttctgcacagcaaaagaaactaccatcagagtgaacaggcaacctacagaatgggagaaaatttttgcaacttactcatctgacaaagggctaatatccagaatctacaatgaactcaagcgaatttacaagaaaaaaacaaacaaccccatcaaaaagtggggaaggatataaacaaacacttctcaaaagaagacatttatgcagccaacagacacatgaaaaaatgctcatcatcactgaccatcagataaatgcaaatcaaaccacaatgagataccatctcacagtagttagaagggcaatcattaaaaagtcaggaaacaacaggtgctggagaggatgtggagaaataggaacacttttacactgttggtgggactgtaaactagttcaaccattgtggaagacagtgtggtgattcctcagggatctagaactagaaataccatttgacccagccatcccattactgggtatatacccaaaggactataaatcgtgctgctataaagacacatgcacatgtatgtttattgcagcactattcacaatagcaaagacttggaaccaacccaaatgtccaacaatgatagattggattaagcaaatgtggcacatatacaccatggaatactatgcagccataaaaaatgatgagttcatgtcctttgtagggacatggatgaagctggaaaccatcattcttggcaaactatcgcaaagacaaaaaaccaaacaccgcatgttctcactcataggtgggaactgaacaatgagaacacatggacacaggaagaggaacatcacacactggggactgttgtggggtggggggaggggggagggatagcattaggagatatacctaatgctaaatgacgagtcaatgggtgcagcacaccaacatggcacatgtatacatatgtaacaaaacctgcacattgtgcacatgtaccctaaaacttaaagtataataataataaaatgaaaaaatttaaaaagtagctgcctgtagaagacaggaggattcctgcattcttttaaacatgctagccatctgcagcagataacagaccccatgtagcaaaaattcctttttgaaatccagtctcatcagcaagttactcaggcaaataattttttcaccagcaattttcccatcccctttagtctgttgatgttgctttctcgtcctgagctttgagtcctgttgatttttcttaagaaatcctagatagggtacaatttattagagaaggcttcctggcttccatgtaacagtgtggaaactgatggcagattgaactggagaacatggaaaaattacctcctaatagtgcagccaactcaaaagtaccttccccagcatttctgaagacaatgcaaaaatatgatgccttataggcagccatgcctcagaacattattgaaacacttgtttcttaaaaatttacatttgctttaatgttgaagtttttcttctcaaagtctactgtaaaaaattaatgagatgcagtcagatggttatccataaaaatgttcatttcattgtaatttataacacaaaaaagtgcaaaataagaaccaaattaggccaaaataaggaactagttagataaattaatatatatccttattttgagtgcttatatactggcatactacagagtcactacatgttttgttgctaaagaatatttaatgacatggaattttgttgatggtagagtttggtaaaaagacaaaaaaaaaggaaaaagaattttctatatagtatgtacagtgtaattcaaattgtatgtttgttcacagaaaaattagtgagcagatatataatcaaaaattaatagtggtcaattgggtaacttacaaagcaacaataacctttttgaggcatttctcaagacttaaaaattttttttctaaagtttatatgggttttctttgcaatcagttaaagatgttattttgaaatgcttcttcttttgagtggtgaacacttcttgaagaggaaatgggttcattctttgacattcacagaggggttagaatcaagtcagaggctaatggctgagtcaccaggtaaggaaggtgtaggcaagagatggaaacatagaaaggggctcatcgcaaactccagtcttttcagaggaataagccagctgacgtgaggaactgctgacaaatgacactaatgaatcatagtggcattgggaattagcttgggaggggaggttaattcatattgtgaagaaatttagtgtgcagaatttgtcattctctaagatgaaatgggcattatttttagttttcttttgtttaaagctctgagtggggccttgaggtaccagctagaagttccagggcttgagtcctaggcctcttttcttggatttgctatcaaaagtggtgtggaatatttatccgcaaaaactgcagtatgctcgtctatatcatgggattaagaatgtcttcttatgttggccgggcgtggtggctcacgcctgtaatcccagcactttgggaggccaaggcgggtggatcatgaagacagagattgagaccatcctggctaacacggtgaaaacctgtctctactaaaaatacaaaaaaattagccaggcgtggtggtgggtgcctgcagtcccagctactctggaggctgaggcaggagaatggcgtgaacccaggaggcggagcttgcagtgagccgagattgcgccactgcactccatcctgggcgacagagcgaaattctgtctcaaaaaaaaaaaaaaaaaaaaaaagaatgtcttcttatgttccttaactctcagggttgttgggagggccaaagaaatgtgaagcatttctctgagcatatactatacatcgataacccaaaacaacactccaaacaagcctacattaaaaaaagaaatctttgctatctgtaaacactgcacttagttaagaccttgagcaaatacaatgcatttttttgagactgccttatcagcggtaagataaggataataatagtcatggtggttagttttctgtgtcaacttgactgcaccaagaaatgtccagattaaatgtcatttctgggtatgcctgtgaaggtgtctccatgtgagattagcattggatcagtggactcagttaagtagattgccacctccaatgtgtttggggatcaaccaatccattgagagtctgaatagaacaaaaaggtagagaaaggggaaacttaccccttttctttctcttgcctgcctttcctagctgggaaattgttctttcactgacaatggactaagatttacaccattggctcctctggttctcagacctttggacttgaaatggaatgaaatcaagggttttcctaggactccagcttgcagactgcaaatcatgaaacttctcagcctctataattacatgaggcaattcctcaaaataaatacatctctttctcacacatgtgtgtgtatctgtgtgtgtgtgtgtgtgtgtgtgtgtgtgtgtgtgtattgcttttttcctctggagaaccctaactagtacaacagtaaccagtcaacaagttgttatgatgattgaatatatcaatttatataatataccaagcagaatatctagcacatattagtgatcaatatttcttatcactaacgttattatcattatcaatatcagatttatagatattattcttaataaagttataatttccctcaaggttattcaaaccagtagctgatatttctctcaggtgtatttattctatgaacagtaataacttctctacaatagaggcctctctttatgatacatataagaaattttcattaatttattgtgatcatcaaaggtacaataaagacttcaaagtagaagctgcttcagttggtacagaaccctttatagaatagtttcacaggtagatcgagttctttttactgtttaaagatagaaatgatgaaacaaatttatattttggtggaaatatctttgttaataattattaagcagatggcattgtacataaagtttgcaaagaagcctactaaaatacagattggcttccttataactgggcttatcctcagtgtatcacagaatggtttagaacctgggaatgtcagcattagaatggggcatggaggttgactagtccactttaatctatcgtatcaacccatttattagagccttatatgcagtaactccagaactagaaactctcagctgtaattatcagttgcattaaatgctttccacagtgcaggaaacaacacataaccaaaatcaagttccccatgtactctggctcttccatagctagtgatatgaagctgttcatatctcttgattgtctgagcataatattactgatgattacaaaaccaaaaatcaacaaaaaccctgtttcttgagagagcatattgcatgctagaggcctcggtgtttggagaaaattaatggtcagttttttggagagaaaataacatgtgccaagccccacaggtgaggagtatagacttcacagcaagatcatcgaatgtctcaaggtaaggagagctcagaaagttgtagcaaacatggataaattgctagtgaggcaagcacttgctgaaatggctttccatagaggagtaagaaaattagcactggcccattcggttaacccaatattttaacaaaatgttcatttttactatcattcatttttaaatttatctttacttgtattgatatataacagttgtaatagattgagggtacacgtgaaattttgatacctgtataaaatgtgtaatgatcaaatcagcataattgggatagtcatcaccccaaacatttcatttttcttgctcgtggaagattaaacaatgctggcaaagaaatggtttcctttcctgccacttttccatgaaaaccaggctatagatggctaaaggccaatgtcactcctaaaacagtttcattataagtcattcagcaatctgaatactttattgttgcatttcagatagacaaatgtttactatccatgatgctatattacaatcacagatattctacatttacaacagtaggaagacataattttggaaaaagctgtttgcaattgactgtggatccattctatttataatattgaatataaacatgctaatactacagagaggaaaatgtcttcccagttgaattccctaacaagctgagacatagaatattaattctgcaccaatgttgatgaattctgattctaaaaatatttcttttaatgaatcatgaaattcttaagtttcaggttcgttgaaacaattagaatatgtttcagtttttagaacaaatgctttattaaaatgcacatttaaatgagacacttctctaagacctgatactttaagatgctaagtcctcaataacaataattaaagcttacatctcattactaataaagtgaaaaattgaatattgcttatgcactattaaaattcaattttattttataaaaaagtattaaatgctactgaatcaaaagtcaacactgattgataatttgtctgcatctattacatgaaagctatggccaaattagggatacaaatagagaaacacatgcctttctatcgtatacgagtaacaacccagggcatgggttttagtgtgatgaagatgtggtctcctatctcagcttcatgacttatcagctatttgacctagggctgcattctttagcttagctttaccttttattaaatgtggccactaatgcctaccacagtaacttgctgtgaggttaaaatgggaaaacacatgtcattttcttgcctttcaccagggagtgagacataaactgtttctctgtagggttactcttatcttaggccttcacttcctgccttggccgcatcacattcctccattataaacactttttcacacttagaagaattttacttgctcatttgttccgatttgggggtaagaagatagatattgcaaatttaaatataagctccatgaatgcaattactgtgtttcatttgcttttgctttgctttttcatttttactcaaacttttgtattttgtgcttctgctgtgactgtcatataataggtgcataagatgaataataaatacttgttgaataaacaaacacgtaaaaatccctgtaggtcatgggtgatacatttttaagaggggaataatattcaaaactaacaatgaaggtcaaatgagaagaagtggaatatgtcagaccaggaactaggaattcaggagaagtgtctggggcaacaccaagaatgagagtatctgggggaagcacgtggcagacagacccaggtgaccgtgcaaatcctctatcgctaacaacaaaagctttagtgaatgtatccacagcattactttgaaattcaaaggcaacacgtagctagggtgtcatctgcaagtagcaacatttctctattgatactataaattattacataaaaactagcaaaggaagacaaggatagtctttagagattttgcaaatacccggaggagttttcttaatgaagaggaaatattccgacatatgacagaaatctcataaccaggtataagcatcctataaaaaaaggaggattttttttaacttacagagctgtacctctgtagaacacgatagctaattctgctgcacattaggcagatgaagagacctgattcttccagtctacagatgggtcacagtcacatttgcaagagtagtctgtcacccagaaatgtggaggccaacagagcaccagcccaggacaccctttccctacacacaggtggcagaaatatgtggccctggcttgctggaagttctctactttaaaaccaactagcttctctctctcctgagtcccaaaagacagactgcctggcagcctcaacagctgttgcaatcacgccagtccagaggggaagagacccacaaaaccttcaaacacttcgaagcttaagctgattttgtcaactagaatttagttttacatgattcatcatttgaaccattactgcaaaatacttatgtgtgctaaaagaaaatctttgaagacctgatgcctaaatcactgaagaaccattatcgatttaggccacacagttgctatgagctgtttttgaatgatgctatttttgcatttttttccctcaagcagcaggcaattttgatacacctactccttgccaggcactatgttagccttagagattggaagggttaaacatagtgcaatgcttccattgtcacaaaataaagatgctgggcccacagatgtaaggtaacagatccaccactgagtaaaagggtttgattgtaaaagttgaaaaaataatgaaaaagaaaaattagttcttcagaaaataagaatgtaaaattggacctaatttttcttttcacaagcactaatagttaaaattctgttcataagtgaaacatagactctcaactattatcatttaaaatgcaattatgaaaatataataagtaatttttcatttcttttttcttttgtctaagtttctctacattatttattaattagttcttgcaaggatctcaagagataaggattatattgctaatatcctggttgtagagattttaataacttaactcaaatcagcaaagttaagattaaaataggaatgaaatgaacaagggaagttattttattgtataaaagaatttcagagttggaagaggttttgtagagtacctaatccaacctttgcattatataaaataagactgtgaagatgagcaacttgtttataggtcacacagttgctgacaggtccaatttcaaaaccacctcaaattactgtacatttctcattgcttctgttagccatccataccagtcattgcctaacaatttaagactagatactgggcaaggtgttgtgattttgtgaaccagaaatgcagttcttgttcattaggactcttctctataggagggtacaataaagggtttgaacattgcaatggaagagcaggaaacttcatgaactaagagagacaggtgtagttcttgttccctagaaataaatcccaatatgcatgcagagggacgatatggcccaggaacatttacaagaaatatgtatatctatatatttatatagatataaatacatatatatatatatacaccacagatggtatatatatttatatctatatatttagatatatctatatatttatatctatatatttagatatatctatatatagatatatttatatctatataaatataaaaagcaaagcaaaagcaatccacaggtggatatatatatatatatatatatatacaccccacaggtgttttttatatatatacaccacaggtggatatatatatatatatatatacacacacacacagacaccacaggtggagatatatatatatatatacacacacacacacacaccacaggtagatatatatatatatatacacacacacacatatatatatacacacatatatatatacacacacatatatatatacacacacatatatatatacacacacacacacacacacaccccccacaggtggatatatatatatgtgtacaccacaggtggagcatatatatatatgtgtgtgtgtgtgtgtgttctgcacagcatgagtacacatgcaataatataaaataatataagtggtaagggccctggtcactagagattgccttctgtatttaaaatgagagcaaccatactcaggcgtacctctctcttgccttgtgtgggcatgagctccatgtcaccagatttgattttttttttccagagacatcaacagtatagactttaggagatggtctaaagctcttagcttggttgctcgcctgagagaagcagagttagaacaagtgaagtctacccagttagcaaaagcacaatatataaagatcgtctttaaaattatttgtgtttaaattcacaccttccccttgggaatcttcgcacggatttgctaattgggtttctctgaatattcagttgttcaccgctgactgactagacttcccaaagccttgataactggagaatttccaaatgctgcatttttttcagccaggcagatggcatggtaatggtagatgtgaacttatgtcctttttccttttatagcagtgcctgagtatctgactgacctactgggattaatttactcttacaataggtgataatagagcccaattccagaagtggggtgctcagcagttcttgctaccatgtaccattttcacagccttaatgtgggaccagagcagtataagggcttaacatatattttctcctttattcaaacattactcctaagtactattattgttcaaattcagctagaaaactgagactcacagaggttagttaaacaactttcaaagtcaaacacctattaaatggttgagagtgactgaaatctggataccttaattttaaaagtcagtgctttcgctgttgtatctccccatgaggccaacccaagtggtcaaccagtaaaaaatttggtaagtatcatgtgattttctctacaaaacagtgaacaatctagtggacaacatttttcttttcagtttaaactagaaattcgtattttctttaaagtgtaaggtagaaatgactagatttcctggtatcttgtaaaggaggcaaaatcaacagtaagaagggggctaatattttcagtctctggggaccaattattacattgggtatacttccattataataaagatagatatacaaacatgcatgcatacatacatacatataaccatatcaaaaacaggcttgggtaacagaaaactaacaggaaaaaaatcctatagtttgaaagggaggtatcgaagttcaaagtagcactctctcttccgatgcattagtgatggtgttggaaatggcagtgggctggggaagggtaaaagcgatggtatgtatgtattaaggttctcttcctctaaccttggaatcacattaagtttcaaatacttgtcccataccctgctaactctatgaattttggcaagcaataaccatgtcaggcctttttttcgttgatcttggtggaaagaataaatgaaataatgtatatcaagtgcctgacagtgtccagcacagagtaggtacccataataatcacttcttctctttcctcctcctttactgattctctgctcagcagtggaggagtttcaaagcatggggcatattaatatggtaagattatttgaagatgttcatttagaatatgcaccagtattttcatttaaattagttcactcttcaaatcagcatggtgctccaaaaggtaacaatgttttggcgatgaatatgtgccagcaacttggattattttaaggcttgtataatatttatctatgaaaaaattttcccctttaaacattcaataagctcatagccatttgcttaagtattccatccaagcataaaagcttcccaatgaacgagagcactgtcttgtgacaaagcttatttctgtgtatttttaataagaaagggttcagaatggtgatttcttgatatccattcaggctttgaaaagagatcttatccaagcaatacattttctgaaagtgtaaagggagtggtaaactgttcagaaagggaggaggatctcatttctttctttttttttttcccccaggaaaaagttctctgcaaaaccacaggtggacataaaagtatccagacaactacactctcgcagagatcttaggactgttaaaaaaaaaaaaaaggaaatatacatatatatgcacaaaattgctgataaccataataaaaataatgcagaaattctccagacttggaaagtttaaaacattatgaaacttcttccttacagttacatagcacaattatttgtgtattcagctctgaaattttcgtcttcacaaatgacagtgaatattctgctgtagcagatgcttaatccattaaataagtgggagtcactaaaaaatccctgtctcatgaagtggaatcctactatttggctgaattttcctctggttttccaggaggaatacgcaggatacaaaatttgatactgacttctttatggtatcaagagtgacagttacataaaaacatatctggtctttctgacttttcaaaactatatttttacttaaattacaaacagaaaacagattttcatgttattggctggcgattttatgggatggaggatttaacagagctgtgatttagaattaattgtttgcttttctaaaaaaaacatagtcaacaactaccctaggagatctgacccagtaggtacttaaagcgaggatgggaaaggctgtattttctttttaaatcttctcagaaaaagtagcaatatatatcaaacatatgttaaaatagtaaaatatatgtaatataaatatatattatactcatatatgtttctatattatatgcatatatttaaatatacatatacaaatatgtatatatctacactgtatctcagaaattatctacaaatatgtcatttatcttgacatgtaaaagtacacatatacagaactgttcatgacagctttttttaaattattgaagaaatagactcaatttgaatggccaccagtggggaatgcgtttaaacgaattatgatacagccatataatggagtgccatgtaactagtagaaacacaatgttagatttatatagttgaaatagattaaataaaagctatccaacaaatctatctatattgttagattatggtatattgtagagtaaggcagaaaattttaggaaaattatacaggagaggagatctttattttcatcttaattccttctctgtgagctaaatgctattgttttcatttgtatttgcatgcattactttttactttaacggataaaacaaattaaaaaatgcacacagcaatcctgatgttcagccagtaccgagaacactgtggccctcatatcatgttaaggtgctagaacaaggtttaatcactagagtgtttgttgctccatcaacctaaaatattaatacaaattttgcccggggtaaaaaagtattcatttcatattaagaatgtttcaaaatattttgtttcaaaacatttttgaaacttaaaatgttttgaatcataaagcaaccttgagtaggtagcctacagaaaatgtggcacatatacaccatggaatactacgcagccataaaaaatgataagttcaagtcctttgtagggacatggatgaaattggaaatcatcattctcagtaaactatcacaagaacaaaaaaccaaacaccgcatattctcactcataggtgggaattgaacaatgagaacacatggacacaggaaggggaacatcacactctagggactgtggtggggtgtggggaggggggagggatagcattaggagtatacctaatgctaaatgacgagttaatgggtgcagcacaccagcatggcacatgtatacacatgtaactaacctgcacattgtgcacatgtaccctaaaacttaaagtataataataataataataaaagaaatataatgggaaaaaaaacataactgagatgttttgatgttttaagtaactacctgaggtatgtttaagcaacatttaagtaacatgaatgaggttttgtttttttttttttttttgagacagagtctcgctctgttgccaggctggagtgcagtggcgcaatctcggctcactgcaatctccgcctcccgagttcaagcgattcttctgcctcagcctcccgagtagccaggattacaggcgggcacctccacaccctgctaacttttgtatttttagtagagacagcgtttcaccacgttggccaggatggtctcgatctcctaacctcgtgatccgcccgcctcggcctcccaaagtactgggattacaggtgtgagccccttccctcgcccggccaaggtatgttttaagtagactacctgcttgaggtagatttatgatacatacccattatcgtgacaatgaaataaaatgaaatgtgatgagaaagtgaaccattccacaccatcacctaagcagggcagcacacgaagacctgatgtaacgctgacaatgttaacacccctgtgtgatgtccaactaaaaataataaaaaaagaaggtgaaaaatttccccatgctgtcaatcaataatgatgtcatcatgaccctgatagaaaactcagtccaggaggttgatggtactaaattagaaatatccatctttccctttggcaaatcctcttttttttttttttttttgtcgtaagtattacatgctaaccttgtaatgagagggcagagaggtaatggggaccaacagcaaggaccctctggaagcctagagccttgggtcccatcctaaaagataagcactgagcacatcacacttaacctctcagcatttcaactttcctatcatctatgagatgagaataatacttgctatctaccccataaaggggttgaaagggatgctgagaaagtccatggaaagcactttgaacttctcagaagtaagattttacagaagtacaaagcctcacatcaaaagacacactcatacctttctgtgacatcaatgagtgtttcatagataggattatgcataggtctgacgctgaatgtgctttatcattaaaataatttctacggcaatttcttttctttttacctggacatatgaatgcatatgcagccttgacaaatcttatactccttctcagatcactgtgaggggtctctgaggctcatttttggctcaccaagctgtgttatttagccaacaggtataaaatgtggtaccccctacttctatctttaggcattgctagaaagtaatcttctggagaaagaaaagtagaataaatttcagtaggttattgatgacatcatgtgttatggccatatttgacacagaacagaactaattcattcaaactccttgttagcaccaacctcttctgaaattacagctgtttctactgctatctagtctacattattaagtaccacctgtgcactcagccctatagaggaatgttccatcagtcttggaaaaggaatttgtctgctagatagtgttaaaattacatagccattcaaatctttcttcgataccttgaaaatagattcttaatactggctatgtattaaaatcacctgagtccactggagaggagctaaatcataatctctgtggctgcttctgccacacagagatgttttatgagattccacatgtgcatgttaatagcagcactactcataatagccaagtagtggaaacagccaaatgtccatttgcagataaatgaataaaccagctagatatgtgggatgttattcagatgtaaacaaataaatggattactgatatgctacaacatggatggacctcaaaaacatcacactaagtgggaaaaaaagacacaaaaggtcacaggttgtgcaattccatttatatgaaatatccagaataggtaagtgtgtagacacagaattcagatttgtgattgccaggggtaagggagaggtgagaaacgaagaacaactgcttaatgagtatagattatccctttggtatgataagaatattttggaactagattgaaaatgttgatgcatgacattgtaaatgtatatatatgcatacatgcatacattcagacatagatttccaggtgtttacaaagcaatctgtgctaagagtcatggtctagagtttcaaacatggttgttgcaccagtaccattgcaactgtacagtgctggcccagtactatgcattgccttcaatcaccagtgcatttcttaatgcttttcttggtgtgacatagggagcatcacctgaagtactgagcatcttatatgagcatcacctggagtatttgcttgtgatgaatgcatattcccagtcttcactgcagacctacagactcataatctcataggagtaatagggcacggttatgcatttaaaatcattcctccaagttattcttatgcatttcatttttatttttaattgacaaataaaaatgcactacattttaaaacttgaaggccctactttggactttgccttactcttccctatttatcattttttgagctttattcatgacctacctccactgcttaatgctgagtatccattatctcttttaagcttcacaaatgacagcagtcttcatttataggagagaaaattaaggctgagaagaggaaaatgagttgcccccaagagttcacatttagaaactggaaaaacctgtaaccaaactttggtttttctcagaaaactttaaaccctttactctttcacaccttatcccttccaaggaccagttcctggtctctcattgtcccattgtcgctatcttctaatatttccctgtaatcatcgcagtcaccagataatcactgccacccgtccccagactcatcaactgatgaaccactattttcaatcatcttttcttgaaatttccagggctatttgacttcaggtaaagttgaccgtctccactttaacctgttgagaccaagtcagtcttgaatgagctcctctacccccaccctggctgttgcatttaatctttgcacctccctctgcccattttgcccaactatagagggagacgaggccctacctgtgtcccatcccttctcactacctgagcacccttcctcccaagctcatgcccccatccttgactctctccctctccatgaggtctaatatgacctttgattaaacatgcttaaattgtaccccacttccaagtaataacagctaagtttaaaagccgtgttgcttcttctttcttaaatattatcttatacctatcctttgtattttttcatcaccagtttttttcttatctcccctctcctcccaatgctgctctccttaaagttatcaaaaatccatcttcaggccaaatccatttgtcaatgttcagttcctcctcaacacctgcttcatctgacatttaatctccttaaactctcccctccctcagcctcagcctctgggtgatcagtctttgttttctttttctttttatttgtctcttctccagtaagtcccttaaacttttctgacccttagtatctttacctttaaaatagaaaaaaaaaaaaactaattcaggatgttgttatagaggctcaaccaggcaaaacctactttgtgtatgtgctcattgaacagacatttgttgcacatctcttgtatgcacagtactgagttaaacactggggtataaagatgacattgacgcggtccccaatgttgaagaactgtaaattgacttgaagaaacatgttgacaataacccggatgctttattcattcatttattaattcaattaattttgatcaagtgcctataatatgtcaagcagttatccaggcactgaagataaaacagtgaaccagtctgaataaatcactgcccttgtgtagcttacattttagtgacaagaaccacatagcaggctagataacatcagggaacataaatgctagcaaggtaaaaaaaaaaattaggataataaaatacagagttgtagcagtgagatgtgctagaagtggggtaagaaactacttctatgtggaaatgacgttagtccaagtcctaaatgatgacaagaagaatcagatattgagaaagtgtgctatatgaggaggacactgcaagtacaaatttcctggggttaaaatgaacttagcatatcaaacgggcagaaaggaagccaaaggagctttctgaacagtgaagagaaaagtggctcatgcctgtaatatcagcatttggggaggcccacattccgggatgatggcttgagccaggagtttgagtccagcctgggcaacataatgagatcccatccctgcttaaaaaaaaaaaaaaaaaaggacaaagacaaagaaaaaggcaggcatggtgcacacctgtagttccagctactggggaggctgaggtgggaggattgctggagtccaggagcttaagctagcagtgagctatgattatgccattgcacttcagcctgggtgacagagtaagacagtctcaagaaaagaaaaaaaagagagataagtaagagaatttggagaggttttggataccatgctaattaaggagtctagatttaattttaatgcgaaggaaagccactgggaggttttaggtaggagaatgtggtaatccaacaaatgctttaaagattatctgaaagctgcatggataattgattgtgctttgggagcagcagaaacaggatgactacttatgtccaccttagtagctcaggcaagagatgatggctgagattgggctgatggctgtggaaatggtgtgaaatgctcaaattttggttgctgaatgtgctttctaaggtctctctatatgcgtacttgttgttttccattttacctatcagaatttatattttttgagcactaggactttgctttggtcatttttccatgccacaatcgctagaacagtgcctgacacacagtaggtgctaaataaataaacatttgttgaattaaagaatgaatagcttgcatgtggatgctgagataaactcttaaatttggtgcttgagcactttcattgacagtgtgtcatcaactgagatgggaaagactaaaaaaggcacaagtttgtgaataaaaagcaagagttccacttttggcatgttcgatttgagacgtctcttgagagcagacacttctatacacatgtctggagctcagggcctgatatttttttcattcattcatgttttgtttccctatttgctgtgaaagcttggcaagaccagggtctccttaagtgtaccccccagacaagtgatatcaacataacctgcaacttgttagagatgcaatgttttgggctccacctcagaccaactgtatcagaaactctaggctgcggggcgtggtggctcacacctgtaatcccggcactttgggaggctgaggcaagtggatcacctgaggtcaggagtttgaggccagcctgacaaatatggtgaaaccctgtcctctactaaaaaatacaaaaattagctgggtatggtggcatgcgactgtagtcccagctactcgggaggctgagacagaagaattgcttgaacccaggaggcggaggttgcagtgagccgagatcatgccattgtactctagcctgggtgacacagcaagactcagtctcaaaaaaaaaaaaaaaagaaagaaagaaaaagaaacaccaggagatgagttcagcattctgcatttaaccagacctgttcatgactctgatgtgcatcaaggtttaggaaccactggtctaaaacactgccagacatagccataagaaagagctgaacatgatttggggcagctatgcaaagtagcaagccgttctgattgttttttcttgcctctcatcaaatctctctttatcatttgaactttcttagctgctttactttgtccttagaatcaaatattttctcttcttttaaattatgtaactatggttaacagcagaactttaaaaaaaattagcctttccaaacactttctcatctgtcacttaattttagcttctgagagctatgaaacagtagggatgggaattctagccccacttcacatacaaatatatgtaggcaaaatcccattaggtgatttattgatgatcacataaatttaggtagatttgagacataaaaaacattgacctcaagctttactcttaacactgatactaccgagtaaacagtaggtgctcaatacatatttaatgactaagtgaatgattcctcaaatagatgctgcaggattcaagaaaatgcaaatttactttatcatgtatgtacgcgtggaaaccagaatactacgtgaccccgaccttttctttaattggacacccacttccaagctctacccatattatccagcaatatgggaattttatgagggaggcagattataacctaaagttatgaataatcagtttcttatatctttaagacaataattgatatagtgtgctctaattcttaatgtggctacacttctcattctgtcaattacttgtgcatttgaaaacagaggtcagtgttccatgtcctgacctctgttttgaattacttgaagaaggcaaaaaactggtgatgctgagactgattcttgccaatgttatctgtctctctttattttaaaacttaaatcgcttccctacccctactggaatgcttttagcctatcgtacccatgataataatgaaacattcctacatttgcataaagctgtctcatttagcttagcttagacacagattttaaaaaacccagtagacattgaaacatagctagaatacggaaacattaatgatgtcaataataataataatagaaaacattttttgaatgttcactatgttccaaccactgggatgctggatgtggatggtaacatttacccgggatgtgaaggacttactatttttcgtatttcacagatggtcaagctatagctcagagagtttaaatacttttcacgtcatactgatagttcatagtgaagctgtgatttgaatccaggactgtcagactccaaaacccatggcattcaccacttttccacttcaagactgtcagcctccaaaatttatggtatgaactactttcccactcctacctcattaaaacaattagcattacatccgtgaatgcctgtcatctgtgttaacaactcaggcaatgagaagactggcctagttcatgtggtcaaatacagtgggtctattttaattatactcatgctccattgggtcacatggacataaatacatctggttagagtttttttgtttatgccttcaattacctggtttaaagcctagtcacaaacatgctccagctctttcattatggtggttggccatctcaagtttttacaccatttaatcctacctccaatctttgtttttcaccagcttctccagtccctttctgccattggctactggttgtatgctggaactcttgttattacagaaaaaaacacattttcagcttctattgcatagcaggcctattttgagcatgatggatacagcaatgaagaaaagcattaccttttctaaagtgccttacggtcaggtggggacgagagacatgtaaacaaataaggcattcagtttttccatattttagcctcagctctttgcaacttgtcttggctgtcaccctgggtgtcagctgcgcaggttctttccaacaaaagaaactcctgcttctccttctatcaaagggaacactatcctgctgattgaaagtttggcaaagcgcccaagactgtgtgtgtgtgtgtgtgtgtgtgtgtgtgtgtgtgcacgtgcgcttatgtgcattgtgcaatgtctaaacactcaaacaggatatttggaacagaactgtgtgattgtttcttatcagacctctttataagtgaccaatttaaagctgaagatgcattaaaacacaggcttcaggtgatcatctgtaatttaaacggagaaggtgagatggtcaggaatttagttctgagagttttgaccttatcatcaatagaaatgagcgtttatggtctttctatttaggaaagagtctctggctttaagcggctatgccttactgtgctttcataaaaggtcaatttgaaacattctgggcttttaatgtaccaatgaattacgggcaaaagcctttatcctaaaactattagataaaaattatatctttagttttgggataatatgaagaggcaaagccttcttcaggggactatacatagctatttataagtattcgtgattgctgtattgcacagtactgttaatttaaggcaaacatttttgcgttgtttaggatttttgaatgacatgcccatgacgtagtttgcgagaaagggaaaacacttggatgtagggcttgagatgaacttcggactcttccagcggccaagtgtaaatgttaggccacatgagcataaacacatctggctggaacttttcttaatgccttcaattacctggctttaagactagtcacaaacatgcaccagttctgatgtccatagtagacagagcttatctactagggtacattattttgctgaatccagagatagtctcagaatccttctcagcacagtgcttcagacattcactgatgatgtaggtaagtgggcccatgagatggaatatttttgtcattccaactataattcaaactcttttcgtttacagaggacaagactgatattcctaatggtgatgtgacttatttaagatcaaacagataagcagtcaagttgtcactacagccaaggatacacactgcttctacttcttggcccaagtgctttgaaaaagggaatcattttaggcaaggagacgttttctgactgagttgtcagctcttcttttcagctaaacatttatattaagagatttccattggcagagccccttctcacccccatgatgatcctagaatttaacagccggttttggagttcactgtgtctaatattgtctgctcttatttttgcagaggctattctatttccatagaaggcttgattataaaatcacacagtatagaaaatagttgtgtaaaaaaccttcaacagaaacactgaagggactctggctttaaatcaatgcttggctttaaatagggaagcaaatatcattgcgtaaaaaagataactaaaatatgactcattgctgggagaaaaggggatacttttgagaaaagatttctttaagattatgtcttacagagctgcttacacatcatacagagtattagaatggtttcattactacaagttaagagtcagattagaataatcattaaaagggaattccctgtattaaaaccaccaccttccactgaatcaattacactcctgtgtcatgaacatcaccaagaatcctagattcaacacagcattgaaagctggcatgaagattatttattaaccttagcattatcccaatttgacttgtcttactaatttttgtttcatccagtctcactaatggtcaccccattctcccagtcactatacccagaaacccaaatattatgttcgacttctttcattctctccctcatacacctaatctattaagtcctattggctctacgtctacaatacaagctagtgccatcaacctcttcccatcttcattattcccccaccctagttaatgctactgtcacttctccccagactataaaataaattacagaatgacagccctgcttctcctctttccttccactccaatttacacttctcatggtggttagactgattttcctacaacctgaatcagataatgtcactccaatgcctgaaattttcaaatagcaactgactgcaatctgaatcaatacaaactcctttagatagcttacaaatttctggaccctgcacatttccccagtcttatctcataatgttcttctgttcactcaccatgctcccaacagatacatcctttcaatattttaaacgcatgctctttcctatcgcaatgacttcccataaacagttcctttttatttattttttttgaaaacctttttcccctttctacacaagagtggatcctgctcatctttcaggtcttggttttgatgtcatctcatcagataccacccctccacaccccatagcagatgctttcaatactctgctcatatcaccttgggttgccctcttatcttcctgaacatgaatattcactcccaactgccagcatctgtgtctctttgttggaggatgaccttcaggcttccagaatgcctttgactgtacatggagagcctgaagtggctgtggatttgtatcccgcttcaccccagagtgcagccttagccaatgactgatggatgaggagtataaatgctccagcttcctggcttcatgatggatttagctctgcaattgaaatgtacttcccttacatcttccctgcaggattgagccagttatcctctgaggatctttgcttgatattgtgttcttatttattctccttccctttctggacctattttttacttccctaccacttctctgggagcaatttctaataaatcacattgacacaaaatctcatctcaggatctgcttctgcaaaagcacgctaagagacaactccaacttttactcaattactctccatcagtgaatcccatttattttattccaagcatttatcaaaaactgttgttatatattgaatttcttgttcacttgtctatatctctcattcaactgtgaacaaactgaggacatggactgtatccttttaaaactagtatacctccagcacctagcacactgtttggacatagtagttgcctaactaatgtttatttttaagagtgaatgaataaataacaaaatccttcctggtccccctgttcatccaggctgaattccttcttcctgctctggtttccatgatgtccatcaagtagcttctgatcagaattcaggttttcatggagcttgactataagggtagcatatcttggtcacactgacatgagtaattggtccatatgataattctccttgttgtaatatgccgttctcctttgagaatacactatatgccaggcagcactaaggtagagacacaatattttattaaatcctagcaaacagctttgtgaggaagatacattacctttgtttttcagaagagaaaactaatattcagagctaaggaatgtgcccaaggtcatccaaatggttagtggcgaaggctgtattagaatccaagagtgactgcaaacccgtgttcttaaccttcatcatgccacctctgttctatgtgaagtttacttagcttcttgagccattctcttgggaataattaagttaaaagactaagcttctgggccttcaaagtagagggccaaatcctagaatgttatgacttatttgagccactactcagctccagctggccttgaccttcaaatcggcaccaccactttctgttcctgccagagccggtgctctaagacaacttgtataactctaaatgtatagccaactttctgtttaattttttaattttattttttgcgacagggtctcactgtgtcatgcaggctagagtgatcgtagctcactatggactccaactcctggctcaagtgatcctcaccctcagccccctgagcttctgggactagaggcatgcaccaccatgcctgactaattaaattttttttctttttttggtagagatgagatttcactgtgttttccaagctggtctggaattcctggccttaagcaccttagactcccaaagtgctgggattacaggtgtgagccaccatgcccagcccaatatatatatacgtgtgtgtgtgtgtgtgtgtgtgtatccttatctgtggtagacattggctatatagccatccaaatcgttagtggtgaaggctctattgaatccaagtctgactgcaaagctcatgttcttaaacctcatcatgcagcctctgtcctatgtgaagtttgcttagcaaactctacacatcccaatttctaccacagagaatggaggctaaagagttgttctgatattcagcaatctacaaataaattttcagctgatggtcaaaagagacaacagtctggaaaacatgaaaagccaaaggaatgacttaggaatagaaataattcactaatttattcaattaatgatatttatccaacatctagatatgccaagtatgcacttgatacaagaaagacaaagcaaaatgagaatcagaaagggtccttacaacactggcatggagatgattagcatggtggttaggaacgtgatgtagaggctgagagttcatgtttagacaactcactgctgaactggaatgcaggctctgtctcttccttactggctgtgttatttaatctgtgccacatttattcctgtgtaaaatgaggatgaaaatactacacccaccatgctcatcaaggtgtcctaaagattaaatgacttaatgtttataaagtttttggagcagtctctgacacatatgatagccatgtaagtttgttcaataaacaaagcagagattggagctaaaataaaataaatgaaagatattatggggatgcagaaaagagaaacttagcctggcgagaaggtgcaaaaaccagaaaaggatcacaaagatgtaacatttaaagcgggtcttaaggccaggcacagtggctcacacctgtaatcccagcagtttgggaggctgaggcaggtagatcactttaggtcaggtgttcgagaccagcctggccaacatggtgaaactcccatctctactaaaaataaaacacttagccaggcgtggtgacttgcgcctgtgatcccggcaactcgggaggctgaggcacaagaattgcttgaatccaaaaggtgaacattgcagtgagccgagatcataccactgcattccagcctgagtgacagagcgagactctgcctcaaataataataataataataataacaacaataataataacgtgagtcctaaaagatggtttggaattcaccaatgaaagaagtgagaggaaaaaaaagagggagacaggccccagcaccagcacaggcaaaagcaggcaggagggaagctactggttgtttacctgaatgtgtttgcataagaagtgagaggatggggagtgatgagatattaggttattgcttaaaaggaattaggacattaagggccttgggaagcaataaagaagtttgacttcatgttatctagaagtaactttaagaaaattttaagtaaaaataatttcacgatcggagttacaaactacaaagtccactctggccacagtatggaagatggcttttgttgagtgaagtcatccacttaccgagttgccagattaagccaggtaagaatgacaggagccttaaataatgaactatcactggaaagtatatttataggaaataatagcaacagacaagccaattttgttttcaatggtcaaattagcagtagttcattttgaataaagttattgacctctgaggcaaagagatagaatcataatggaaaataagttccacaatcagaagtcagcactccaaattaaaagccagtcttcacctatttgatgggtggaaggacacttaaacaatcactgtttgtttctgacttttgaacacatcaaagaaagcatcaatttttatgttacctgagacactgaagaaacaattacatatttaaaagggctaaggaactttgcaaagtgtctataaacaaggtaattattcagaattaattcagtaagaccataataatgattgttacaatttcttgagcacttgctcatttccattgtgctagcaatttacatatattatctcatttatattattatctcacaataattcaataaggtaggtactatcagtcccatttaacagatgaaaaatgggggtttaaagagatttagatactcacttaaatgtcaagaggtagagcagaaaacccaagtctttccacatgtacagagcccacactgataacatctgtggtatcagttctcactgtgaatttatttgaactcagacattctttttaaggaaataaaaatgcaactttacgaagcgtacaatggagagtaaagaggatgcttttcctattatagtcatttttgcacaaattatccttctcacttttcatatactaatgatgttttcactgaggctgagcatttgactaaagtaacaaattattccttaaaaacaaaatgccaaggaaacaaaaaaaaacatgaaaatacattgaggacaactcagactgtcaatttgatagcagttacctgttaacagaaagggttatactatagtgatgacaacttggattccctggatttagccagaatggaatgtgactctcagctctattatttacaaactgggcaaaaacttatggctaaagctaagaagtaaaaaatgaggacgtttgacctaggctaaagtgcatgtggggtgtatctattaggcagaaggagctgcatctgcgaatgtcccaagtacaggtagatcttgtcttaattataaacctacaagtacttcagcatagctggaaaataaagcacacaagatggtgtgtcaagaggttaaaccagaacaatggcagaggccttggacaccatggtaaggagcctgcccatggttttataggggagagtgatgcaatcataatttggctatagtgaggaagaaggactggaaagctactagaaaggtaaggaaacatcttaagacattgccttaacgatccaagtgaaacgtggttagctaaggtcttgggctagtcacgtagtctatgtctcagtttccttatctgtaaaatgagatgacagctgctataatgtaggttatgtgtgagattgaatgagatgatatggtcaaagtgcccagctcagctatgaccactgtaaatagaacgatgtgatgcttgatgaacacaatggatgctgactcaagtttatatttctttcaaatatgactgactcaaaaatgtcatgttgttaaaatttgtccagctagaagaatattcatagtgacagtcctctactgtttaatgtgtattttaattgaatttgtttcttattgaagagtgcattaagctgccttttaattctctcatgacaataataccatggtgttatgtttgactaacctcgggtcctgcatgaataaaggtagattaaaaaaaaaaaaactcttctgacactatgttgaataggagtggtgggagagggcatccctgtcttgtgccagttttcaaagggaatgcttccagtttttgcccattcagtatgatattggctgtgggtttgtcataaatagctcttattattttgagatacgtcccatcaatacctaatttattgagagtttttagcatgaagcgttgttgaattttgtcaaaggccttttctgcatctgttgagataatcatgtggtttttgtctttggttctgtttatatgctggattacatttattgatttgcgtatattgaaccagccttgcatcccagggatgaagcccacttgatcgtggtggataagctttttgatgtgctgctggattcggtttgccagtattttattgaggatttttgcatcaatgttcatcaaggatattggtctaaaattctcttttttggttgtgtctctgcccggctttggtatcaagatgatgctggcctcataaaatgagttagggaggattccctctttttctattgattggaatagtttcagaaggaatggtaccagttcctccttgtacctctggtagaattcagctgtgaatccatctggtcctggactctttttggttggtatgctattgattattgccacaatatcagatcctgttattggtctattcagagattcaacttcttcctggggagttattcttatactttctatcctgtgtacaatataacaaccccacagctaaattttacaacattataaaaggtcacttttaatgatttaggcctttcatgtatcaatctttctacattaacattttctggaatttcaacatcagagttttcttaaactaagtgaataaatattcaagtctctgtgtattttgaaatgactctttgcataataatgtttttatatgaaaatggagtctctgggtgcacataaacaggttttactgatcttttaatggaaccaactgaagcacagaggcctttaatatcaaacacagtgctctcaatgtttataaatatttgtatagggatgccacttcccgttttaatattttgttactttaacaccagtaccactgtttcctctcattaattagctattgatgttttctaaaattaactttgcagacagtgttcactgacagagttctaaactaatgagtctgactttgtcttgagggaggcagaggaggggaggtggtcacagacatgcaaggagacagtgttgctttctgcttcaacacttcaaggggcagaggaacatttcttttacatgtggcctttgagcctgtgaggcatttgagcaaggaacacctcattcaccaatattttccaaacacattttaaaacccatgtgctaagggttttgatagagatggtattgggtgctatgggaagacacccaagacccacctagtccagtcctggcaacggtcaagaaaacttcctgggcaaaactatggctaaagccaagacgtaaagaatgaggatgtttgacctaggctaaggtgcatgtggggtgtgtctatcaggcaggaggagctacatctgcaaatgtcccaagtacaggtagatcttgtcttaattataaacctacaagtacttcagcatagctgaaaaataaagcacacaagatggtatgtcaaggggttaagccagaacagtggaagaggccttgtataccatggtaaggagcctgcccatggttttatagaggagagtgatataatcacaatttggctatagtgagaaagaaggactggaaagctactaaaaaggtgagaaaacatcttgagaggtttccttaatgatccaagtgaaacatggtttgctaatgatagaagagacagagaagatgtattgagacaaagtaaattaggatatctaatagacagagtttgcctattgactagacatcataagtaagtgtgatgcggactatagctgcccaggtaaatccaaggagtctgtctctatgtttttcactgactccttaatttccagcttgttttatttatttttatttatttatttggggggacagggtctcagtccaatgtccaggttggagtgcagtggtgtgatcatggctcactgcagcctcaacctcctgggctccagcaatcttcccacctcggcctcccaagtagctgggcctacaggtgcatgccaccatgcccagctaatttttgtatgttttgtagcatcatgttgcccaggctgatctccaactcctgagctcaagcaatcctcccacctcagcctcttaaagtgctgggattttaggcatgagccactgcgcccgccccagcttcattttagagtgctgggtgaatactgccacatctcgataacctaaattagaaatttacaggaagagaagaaatacatggctcaaaagttggggggaagaaaaggatggcagctgcatagaaagaacagggactcaagagatcagagctcaaattgggcaggcacaattctcattacctgtatgattttaagaattggttttggttttggatgtgagctaaaaagaaagacagtttggcgaaagatcctaaactatatctacattagttcttccctgttactcttcaaatttagagcaaagcccatttgaatttattgggttgagtacttaactcaataagcaaatcaggtattttgggataagagcatgagtgggagcatttcatactctaggtaaacagtttaaccaccggggagtatcataggctcaaagacttttcaggctctgacggtgttaagcaatacctagcacaatggttcccaaccatttctagtcatggactctgttggtcaaattaacacttacacggaaatccagaatgccaaatataaaaagggatgaaagtggagctgctttggttaaggaaggtatgaggtaccagccattgggcctaccctcagctgccaaggaaaacaattctgcagaacccagaagtattgctaatgtgcagacatacactcagactcgaggagtgctgctgagggttggtaggtagtaacgtaaacgtgttaagatgatagaacacctaaaaccatgctactgattgtaaaacagttcaaaatactattagatttaattcatcaaatagatcaaggtcaactttaactgtagaaaataagagttattatgcacatgataattatgtatgaagaaatacaaagccaccaaaatataatctgccacctttttctggtttctccattaataaatatttgctattagctcattcaattaatttttttccagcacttggaagaagacacattaatttaagaatagattgtacccaggtgcggtggctcacacctgtaatcccagcacattgggaggccaaggagggcagatcacttgaggccaggagttcaagaccagcctggccaacaaggtgaaaacccgtctctactaaaaattcaaaaattagccaggaatgtggtgtgcacctatagttacagctattcagggggctgaggcaggagaattgcttgaacctgggaagcagaagtagcagtgagctgagatcacaccattgtactccagcctggtcaacagatcaagtccctgtccccaaaaaaaaaaaaaaaaaagattgtaaaagaaaattctaaattataaaagctctatccacttattttttccttgtgaaacaggaagtgtttgcattattgaatttagggtaaagagaaggatcttggtctaacctgaaatactggtactttccaataatacagtttgggaaccagagttttaatctagtcatatgatttttaacacacgaaatctgaggcattcaggggtccctctgtaaggtcattaaccaaaccaaagtttattgatttatttttctgtaacagtgtctgacaggttatggtcagagactttccatgtggaatggagacaatcaggtagaaaagatttgcttttcatttctagtactgagctttcagtctagacaaagtaaagactgttggtggtcagtaaaaaggactttcttatgctgtgaaatatagcattttaggagatgcagcattactcgtgcaactgtgttcatctgctttattaacatgtgttatttatgatgctcagggtgccaatgcttatagatagttcttggaaacaattttactaatgttgtccaaaggtctgatggggtccaaaaaaaagaggcctctgggggactgcctgtcacagggtaggggagaggatataaagatgggagaggtcttggcttcataatcacccccaggtgctttggggctacacttccagaagcttgggatcaatgggagaaataaaatccttccgtaaataatgcagtgtgtttctataaggctcgcacacacataagaaggaaaagggacaggaactattggttgaaacaggaaaggaaagtaattatctgctggtttggcagtgatttatcgagaatgggaaagcaaatcattaccaatcaagaaagctcttaggatagggcaaggcagagaggtaaaactattagatgcattcagaaagaatttatgtgctttcttcatcagcaaccccatacattttactgtatttttaaaaaattgtcattacttagaaactgtgaaatatgaagaatgccttcttagtcaagtagcatttttatttgaggtgaactgcattgctagcagtttatttcgtgcagttttatagtggtcaggcacatggactcaaagctggactgctgggttccattcatagctaggtattttttggacattttccttaacctctctgccttcgtttcatcatacataattcaggataatagcagtaccgaccccataaagttgttgggaagtgtaaatgaattattgtatgaaaagctctgggaatattacctagcacattacaaatgctatattagagttggctattattatttattcatatataaaaacaacactaaattataataatagctcatgtttattgagtgcttactgtgagtcatatattttcccaagcattttatatgcaagtcagtcatcagatcttcatggcaaactattagatagagttattattatccccattttacggataaggaaattggcagcaaaactcaggcctggagctctttattactatcccttcatctctttaatatgaatttccttttccagtcttttcacatagtttccttcttcgtgtagagaaattaacaaaatgaatgtactttgaaggaggctaatccaagtaaagaagacttaagacaagctatgcctgtttaattcagctcaacaattcacaccttcataagccatgacaccattctcactgtatttcattttaatgctattattttgcttggtgactggtacatataaatattttatacagactcttctctttgtgccattaggatgatgaaatgtatatatgctaatggaattctaaggttctctgatttttcttttagggtcaattgtcaattatctacagcacaattattgtaagttgaagcaattctttcttccacttttctctatcagtatcgtctttgttgagatgaagcattttagtggcaatagacttactcataacatagctagaattgcagtgtctcattttattgtgtcactgccaaggatgatactggcagattcttaaggtactgctttgttgacaatgtagttgacactatttattgttattcttaattattactgatagtacatcaaaagtggaaaaggacaattgaataaacatatccttatcaatttgacctcttctaagaaatacatgatccccttgacttaacacaattcctggtcaatataagtgtctgccccactacacccccattacctgcctaatcagacctacctactgtatcctctatagcaatttcttcctaattgttgactgttctaatggacagtatgttcggaggaggcaacatggagcaatggagaaattgctgctgagttatctcccacagaaagtctgacttccctcctgtattatcctatctcagtgaaagccatttacattcaagtaggcactcaagccaggatctgagagtcatcttttaacagtgacagtgagaaatgatgactagtaaaggaatcgggggagagtggcttgactcactccataatcctcatcattatactctttccatgatcgttttactttccatacctttattcataacatttcctcaattctatgtagaatgctattttaacatatttaatacagtgtaatatccttatctctccaaattgcagagcttctaaattccacttacactaaaacctgaagctgctgcaattcttccaactttttctcttactatacccaaatcccatgaaaggtgatgaaaggtggatcactcgtttctatatactacagctgtacctcatatacacttctattattgcactttccacacttcatgtatgcatgcacgtgtgtatgtacatatggaaggtgtgtgtctccatttgactggagctctccaagggccaggtcttattcatatctaaatttgaaatacgcaacacaattcctagtatgcagcaggacaggtgtgcttattaaattattgcagaataaacagatgatggataaaagaatgattagactaagggtctgcttgcaggtctcatatgaccttggaaaaaatcaggtaatttctcactgcttaagtttgttctttcattaaaaatacaaattattttaaagacttataataatacatgttctatgaaacagatgctcctgtgaacaacaaactaggatacacttgtaaacccttccacttgctgtgaagtaccatgcctgtgtgtgagaattaaaaattgtggatccaatcaaagaagtataaggacagaaaaactatccttgaatatgttttcaagatgtgtactgtttgaaactatatctcaggtaacaatcaacagttttaagaaagagctttagaaatccaatcacaaagaaaagaatctttatttctccctttgggatatgacatttaacaaattaatttagaattctttaaaaccaacggagctaagaggaaattgagaacacttgtactaatcactcccaacttaaatgtagaaggtcatatatctaaaaggttacattactacaatggagaaattcaattactacggactcctaaagggctttacttaaaatagcacagaactgtaatgctgtcaattccaatgaaaataattgcatttccctaaatactgtgaataatttggtaaatacatctattctcttaaagtacaaatttccaacatctgcagaactcaagagcccaaaacataaatattcaaatatttcatcgagagttttaaatttattaataccaccaagtttactcagctgtttctatacttggatgactgatttttgtctgaagtttagtaaagaggagggtatcttgcttcaaactcactatgaagattgttaatttgattttttttcttcttttaacaaacaattcttttaggaatttcttaaaaattaaatgtgacaatctaggtccatagaatgttaaaatttaaaagaaattgatcctctaatcccatggcactcaaacctaaagccattactcaaatatagctaattctgggccctggtgttaatattcagatcctgttggtcagaattgggtacatttgataggaaccatcattggttctgatatgctgattcatggatctgcatagttatctatagatttctaattcagccttttatctttagagatgaagacgttgagatcctgacagcaaaaataatttctgaaagaccctctggactcttacagctgtgattcaaaacccaggtctcctgacttccagtggagtgctcctttataccatgagacatcctggaaggtcacacacctgggcatcagtgttcagagtacactgttatgagcccatgctgaatgcctctagccacatgagatcacatggattaataggtctataaaacaggaaacctcaatgcgagcaactcagcctagcaaagcagaatgaacaaatgggcactcaaatcatgcaagtgtttacacttctaattatgaaaattgttaacagagcttccctttattaattctcaccacaggccaggtctaaataaaatcaggcaatcctcccaacactcctatgagaaagcctagtgcaattcttattttatacagataaggaggactctgagcaaggaaatctagcataacaataaatagtagatggctgggacaaaagtcaaactcagttctctttgctattttcaccattccccttgtcctttccttcctgttgtagggaaataagatacttcaaggtttagcatttttgtatgaacgttgtagaattccaattgcggaggctttgccttcatgcatgagggtcaagcagtactttactatgagatagaccaagggtgtccaatcttttggcttccctggaccacaatggaaaaagaagaattgtcttgggccagacataaaatacactaacagtaatgatagctgatgagttataaaagaattgcaaaaaaaaactcatgatgctttaataaagtttacacatttgtgttggggccacagtcaaaaccattctgggctacatgtggcctgcaggcagcaggttggacaaacttgatatagaacttcctcaagcaaatggtgccactacattctgtccaaccgggtaacaaaataccctaggaaaatagtagcttttattcacaacacacaaccaggcgccaccttaatccacagtgcctgtgaatgtgaccgtttaaattaaaatgcagtcacaaccctgctgacaccttggttccagacttctagcctccagaactgtgagacaatacatttctgtggtttaagccaccctgtttgtggtagtttgtttcagtagtcctagtaaactgagattttctctttttttttttttttttttgggtagatacagtgtttcaccatgttggccaggctggtctcgaacgcttgacttcaagtagtgatccacctgcctcagcctcccaaagtgctgggatcacaggcgtgagccaccgcacccagtcttttcatgtctttaggtcagattcctcatcattggattctgagatggtaatagtgctgacaagtgctttgagtttgaagttgttcaacttgaccctggtctatgtgtcttacctattttgtttcatgttgcaagcactgctagctttcctattcaatacccatcctcccttctttttttctaatagaaagctacttttgtttgtaatgacagtggcccatctataaacttcaacttcccagactcccttgcaactagaaatgattttatgatatagttttgggccaatgaggtgtaaacagaggtctgctaaggagctctgagaatttttgtttgtccgtttactcatcaattcattcctttattttaatatcagtgtcattccttctttcttcactatttattctccatcctgtctggaacatgaatatgaggttagagttgcagcaacaatgttgagactatggatgataagtgtgataaaagccatatgctaagcacggtgtgaagtcaagatataactctgtcaggacttcagcctttttattgagaggaaaaatatacatatagttaagcaactaaagtaagatttttgtgttcatatagccgtattcaattccaactggcaaataataggaaatcagctgtggccccagagaaaagatccacagataggaacttttcaggctcttctgatgaaaatgactagatttttcaactcatcagcctacagtgaaagtcaccaataaacaaggtctgctcagtcatacagaatgcaatcagcatattattatctcactctgaaatattcatagagagccaaggatggaaaagcagagatcaaaacaaatagtataaggaattcagaggctacagattcagtgcaggaaacaaacaaaaataaattttaaaaatatatttgataccctagggtaacatttttaaaagggtcacataaatggaacaagaataagtagccattgtataataaaagaggaaaacacagtaataaacaactctcataaattcaaagaaaattgttagcagatataaaaaggagttcattaaggaagagtaaaaataaatttaagagaatctcacataaagaaatacgttttagaagtgctgcaaagtcagaggtaaacaattagaaaattgcaatagcaattcaagagactcaatatctgactaacagaatttacagaaagacaaagcagaatcaataaaagagaaacacatttcaaggaaataaagcaaaataattcgccagagttgaagcattaggccgtcagattcaaagggcctatcaaaggcacaaaacagtgaaagaaaagaaatccatactgaggcacatttttctgaattttacagcacctggataaagataaaatgctaaacagcttccagacagaaaaaataaaataggttagatgaaaagaatggcgttctgcttttaaacaagatatgagaatatgaaaaagtaaagctttaaaaaatcggaagaaaactgttctcctaaattccaatataaattataggtcatgtgtgatgagatttttttttaattgagagtgaaaatctttgtaaaaaattcccactttctttcttgggaagtaatggaagacacacttcactaatgagagagcagcaaatcagaagaggatgtggaatgtaacccaagaaagaggtaaagataattctttgttaacttttattttaagttcaggggcacatgtgcaggtttgtcatataggtaaactcatgtcacaggagtttgttgcacagatttttactcaggaattaagcgtagtacccaatagttatttgttctgctcctctccctcctcccaccctccaccctccagtaggccccagtgtctattgttcccctctctgtgtccatgagttctcatcacttagcatctatttataagtgagaacatgtggtaattgttcctgaattagtatgctaaggataatggcctccagctccatccaggttgccacaaaagacattatctccttcttttttatggctgcatagtattccatgatgtatatgtaaaatagcagagacatggaatcaacttaaatgcccatcagtgacagattggataaagaaaatgtagtacatatacaccatgaaatactatgcagcaaagagagttctaagtgagcctgaggagacctagagaacagctgccaatggcaacaagaggaaagtgttaaggagagatgtccccaagggcagaggggagatggggaattacagtttgagattaaaattgaaattggcaaattatacatatacagaaactttggcaaatgaaaacaaaaagatgccatttttactctaaggaaaacaaggtagtaaatgcaatcgtatgctatctagaagaggtgggaatagtattacatgactgtaataatgcaagcccttgaatgttgagtgaaaacatcaggaggttggtgataagggagaatgtgtatagagataaaggggtgttgttagagaggataatcctcatgttccatatgtggaagacaggtaatacctgaaatggaaaactcaaggacgatgagtaagaacagatgtattatgaaagcttatattaggttggtggaaacgtaatatggcttgccattacttttaatggcaaaaaccacaactacttattttgcatcaacgtaatggtagaacaaacagtcaaaagtttcaaggaaattgcatctatgaagcagaattcagagttagggtagggtggcacaagttgctgcttttctggttttcttcttgtgtatttttctgttataggtgaagggtcacaagctttaaggtacaatttcattttcttttttaaaagttcatgtagtactttaattaaagtcaatattaaataaaaatatttggctttggatttactttttgaaaactgagttttggtattggcctattgtttcaccatacagaactttaaagattatatatatatatatacatacatacatatacacacacacacatatatatatgccctacacatccatagtagtaaaaacctagaaacaagagctaatattaaatatattaatattaataatttaatatcaattaaattattcatcaaatattaattcagccagcttctagtctaggcactggtgatacatcagtggacacagtagatggacctccctgttgataacaagtgtatattttgggtgtgttcagatagaatatccttggctaagtcacgtactataatctatttgagccctggcttcctcttctgtaaaatgggcatacaattaaccactcattatttcaaaaattaattatgaggacctgttcagcttaaaatttttttccatgttaagatacaacatctcacaaagcagcactttactattaaaagagttcatttcgccatcattcctagcactagcaaattgaactattagggatgagacctccaatattacactactgccacattcctctttattatgaaaaggcagattgccaaaatcagtttctagtcactcagtttgtctaaatattgcagggctttttgatgttgcattagcagaatatacagtctacatttattccattcttttgtcggcctatgcaaaaaaatgaaatgaatctattcaaaatcaagatgcactgaactgcatatgatgcaaaagaaggattttgctaaacacagcaactatgtaatgcaccccattccttccccatcagcttggatcctgagactattttgtaaatctgcagagataagagttttctatatttattgaaaggtcaaaagtttgggaggtggagaggtgtaaggcaggtaggaatacagtattgtatttattaaacaatatgtcagaaacagacacatagcaggcactttgtaaagtacaatagaaaacaagcacctgttatctctaccactctaatttgcaccatcatttctagtaacagcaaaagcctccaaagtggttttcatacttctacctttcccattcccccatgaagacatccattagaatgatccactgaaaatataaaccatatcataacacttttctctccaaactttcattattttccccaaaagtccaaattttcttcaataacctacagaaagtatttgttaaatgaaagaatcaacccatctagcaaccaccagtgagacttgggtcactagatccttgcaatgtgttaagtaatacaattgaaataaaaagcaattagaacactggaaaacctactattctatggtatcactacatggtagtactgggaactaggacatgtgttgtgagtaaggactggaagttaagagaagtttatgtgggccatagtggtttgggtttcttgcgtagcagagactcaagtgtgagttggagatgtgaatgctccagtcattatgttgttatttaattaaatacaagaaagaaaagaacccatacacctgtatatctcaagtccacagctatcacgtcctcaattctataagatacgctttatcctctctataatagtttaaatgatctatttttaacaaaaaaagttacattttcttctttttttttttttttttgagatggagtcttgttctgttccccaggcaggagtgcagtggcgcgatcttggctcaccacaacatccacctcctgggttcaagcaactctccttcctcagcctcccaagtagctgggactacaggcacgcaccaccacgcccagctaatttttgtattttttagtagcaatggggtttcaccatattagccaggttggccttgaactcctgacctcaggtgatccacccacctcagcctcccagagtgctggaattacaggtgtgagtcaccgcacccagccaaaaaacagctactcctatggatgcagtaacactgcactggaatagacagatacataggtgacatacatggactgaaataaaatctgattgatgtgtcaagtttagagcagtgacagactcactgtgaagatggtagagaaacttgaactccagtaaactctgttatctggaatccaataaattgcaaagtgattaagtggtctctttgcacttaggtacacacctaactgatattctaagtagtctttgagaccctgaatttacacaactcaaggagagattaaattgtgtgcagcatcatgagagtgttgggtttattttattgcattccaattatttgaaaattgataacctgtgtacatatggcaacttcccattgatctgaatattggattaagtgaaacactctgaaattgccaactgaactgattgcacctaatgagatggagatgtggaaatagccatgagcttttcatcaccggctgcaaacctgcaattttcttggtgaagaaagaaaacacaaaatgctattggaaagtggttttcatgtcttgcacaaccccttcatccataaccttcaattctagatggctgcatactgttcacttggctaacttctagaatagagtggtggattctaggcaacaggatgtgatcactaaaaagacataaaacaattctaaaaatgtgttttgaaaaatatcaggtaagttctcataagtgagacattctcagtttaggtaaagcttagaattgtgtttcccaaatttcagttagtcacgtagctacctgtaattgcactagcaaatctacatttaatttatatgttatttgttatttttcttacgttaattcatttaacttacacttaaatacattattgttaaaggaaatattatatcactaccaaactataagtagatatcttttaccataaagagataactacaaatataaataaaatattgtcttcaaatattagttctgagttcaggactgtgatctctttgccaaaagagaaatatacaagcatttgtgatgtgttaaagactggcaccaaaagatgtgtgagtgtgtgtgtgtgtgtgtgtgtgtgtgtgtgtgtgtaatgctgttaaaatttagttaagcttttaaatacatttttaaaattggtatctttactataaggctacttgaagtctataaaatgctaaaaagtattgttattttctcagacaggtttatgttatccagtgtttcacaatatgtgtagagcatgaaatattttttaggcagaaaatataagaagatgcatatttctctcaatgtgtgctggcaaattgtgctgttgcttttgctgtttttcaaattccttcatgcctctatgatactctttgcttctgctcagtaagttagtcactctttcttaaacatgacacagttttcatctccattcttgactcatagtatttccttcactgctgcctcactttcagcggttaaaatacatctctttgccacccaaatacttgcacacaaaatagccaaaaagtgagaacacccaaatctccgtcaactgctgaatggttaaacacgtggcaaactcatagaagggatactatttagcaataaaagactgaattactcacatgtgctactacatcaatgggtcacaaatgctaagtaaaaaagaaacaacaaaaactagacacaaaaggccccattttctatgaatatatttgtacgaagtatccagaaaaggaaaatctataaagacggaaagtagattagtagttgcctggtgggagtggaggttaactgtaaatgggtaggtgggatcttatttggatgaaagaactgtcctaaaattggttagatatcatgattgtacaacttggtatatttataaaaattgacttttatatttaaaatgggtgaatcttttgaaatatacatttttccttcataaaattatgtaaaaatttcagccagctaggtggacaatcaaccacctatccattgacccattcttccatcttttaacgttttctctctcatgccataatctgaaggtgatttattcttgtcttgagaaaacataccattatgttttcatatatcatagatcttttcatttgtctttcttgtatgatattcaaatatttgtctaatatccttactcgaccataagtttttacagacaaactactctgaactagtccatgtgaaaataaatacttattgaatctatatatacatatgaagcaaattctatttcatggggaggggggaggggggagggatagcattaggagatatacctaatgctagatgacgagttaatgggtgcagcacacaaacatggcacatgtatacatatgtaacaagcctgcaccttgtgcacatgtaccctaaagcttaaagtataataataaaataaataaataaataaatcatgctactataaagacacacacacaaaaaaaataaaaataaaaacaagtaaaaatacccattagcacatattattaaattgcctgctttgaaatctgcaatttactggccgggcacggtggctcacacctgtaatcccagtactttgggaggccgaggtgggcagatcacgaggtcaggagattgagaccatgctggctaacacggtgaaaccccatctctaccaaaaatacaaaaaattagccaggtgtggtggcgggcgcctgtagtcccagctacttgggaggctgaggcaggagaatggtgtgaacccaggaggcagagcttgcagtgagccgagattgcaccactgcactccagcctgggcgacagagcgagactccgtctcaaaaaaaaaaaaaagaaaagaaatctgcaatttactttttgttatctaactttgaaaagtggtttaatgcctcaacacatcagttattaattcaaagaatgataataatagcagcaacaaaaggtataagcaagagcagccgcctttactgaacacttactttgaactggccaagctgtttggtacttctcattttgcagatgtcattccagaaaaaagaagctgagacacaatgaagttaaatcaactgacttaggtcaaatgccttggatgtagagcccaaggcaggatttgtatacacatggcttttgaagggagtgctctcaaggcatggtaggaatgagatgtaggaaggtaaaagaggggaagggataggagctaagatttttcaagggaagttttgctctagtctgatccatggagatctccgaggataaacaggaaagcagagtttttcctgtcttaagacaagagaatggacttaaatatacctgttcctgttactgcgcatgtgggtgcccttgtgtgtgtgtgtgtgtgtgtgtgtgcgtgtgtgtgtgtgtagccttggctgtagttacccaaaagtaatcctgcagaaaatgtaaccgacgtgagcacttgggggtgcccacttctgggggatgaacacacccaccgggagaagggattccaagagacctgagcagaccccaacagcctctgctacagctgttggcccaaatcgcatatatagtaaggggaatatctgagattcaaacttcaatagttctgatgcctatatcagtgcctttaatgccccacctttttcaggcagtgccacatttgatacacacacataaatgtacaatatccccattatggcttaggttgatccattagcaaatattttttaaattaaatattaatgcaaactaggataagaaagtcaagcctatttggcacccttctttaatattttaatgaactgatacaaatattttttaattacatgcattatttaaatagtgtctgaggaacttggaggttgcttgaaaaggtctcccaaaattttaaatattccccactccatatcttatttagactaatatatttaaattcattctgtgaatgaagatttgctcagaacctcagtttgaacagtgtgctaatcaccatatgttccaaatgagtcactctgaatttctgaagaattgttatatatctttagttttcattttatcagagataaaaccataaaggcaagaaaaatttgatgttaggaagcagttgatgagccaactgcctcccaaaggaaaacaatgccatgaaactacaatctataaaacaaacaaggccgggcgtggtggctcatgcctgtaatcccagcatcttgggaggctgaggtgggtggatcatttgaggtcatgagttcgagatcagcctggccaacttggtgaaactccgtctctactaaaaatccaaaaacaaaacaaaaaaaaagccaggcatggtagtaggtgtctgtaatcccagctacttgggaggctgaggcaggagaatcacttgaacccaggaggcagaggttgcactcaaccacgatcataccactgcactccaggctgggtgatacagcgagatcctgtctcaaataaaataaaataaacataaataaacaacacaaaagcatggcttgatgcctgccatctagcactgcacaaggagttaccaactttgttctaaagatagcatgacttattgcaataacacaaacactgtgtataagaaatgagacaaactctaaatggaaattgctcgccagagcactcagagcctttgttcatccattttcatccttctcccaatccagcttctttgccatttacatgtagatacacaggggaatttccatgtcctccacttatcttggttaccgctttttttctccttatctttcctattttgaatgccagcctcacagctatcaactttcaaataagtagccaagaggtctgaatacttggagtaaatagaatgtttgattggacaacattgtgtatgcatttcactgagtaaaatgctagtctggatacctgcctatgataaggccaccgttccctattaatatgaagcaacaattggttgagcaggggagaattaacatggccaaacatgttatatagtagacagcacctctaactggtcacatatttaagccacacaatggcaaatggggaaataaggtatatggctttggggtaaaggcaagtatgaggcagagaccaatccctggaagtattttctttgaaaagggaatccttcagagagtgaggcacctcatttctattttaaactatagccagaaacatttctcctaaatgagaaatttgccctagggattcctgatgtttgtcagaaaccgctgtaaatttattttcattcactggagagaagagaagggaggtaacatttatgacatatgcttgtgcttttcatctgttatttaattttcacaagtttttcaggataaaatagtatccttattttgttgataagagaattgagatttagacaaattaaaaataaaacgaaaagaaaagacaaattatagcatgtaaaccaagggacagatcttgaggtaaaatccagaccttttggacctgatgttcatgttctttccattcttccatgcaccctagggcttaatacatcaactcggaaatgtaattgagaggaggctacaaggagacaccattgtttgggattaaacaaaagcaggctgttttgtttactgtaagattcctcaacacttttaaaatgctgaagtatattttgagcttctgggaagggcctacaggacaatgtgtccaaaattttatgaccatagagtcctctccccctggaagcattgcctgactttgaaattctactgaaaatattttagatactactgttgctccagtagtgctatactagagaagagaaaggcaagggctagaatggcttctgtttttatttcatagacttctgcatcgcctgaaatgttgtgagctcacattaatttgggaaataaaataagtatcatttacatgaataaagaataataccatgtacattcccaatagaatgtatttatagatacatgagaagaaatatgtgtgtactaaacataggtccatatctcataattattatgcaaaagcaaaagaggaaacatattcatgtactgtctgatgagtattataatgatacagcaatgaacagagttctgtaaaactgggcactgctcaaagtgaacagcatatgttaactcatttaattatcataataatcccctgaaacatatgtaattatctccatgtgtcagatgaggaacctgggacacaggtaagttaatttacgtctcaaaagtcctactagttacttacgtaaggaagtttgtggaagaacctgataccaagtgtttttctacaaaatttcatactacttatgactcccacataaacctattttgcaaggaattctggaagccttgtgaggacttctgaaacctacataaagactaattagggctcccaggatgttatttttgccttctttaactttccatccaccttatcctgctttttgcactttggttattgagaaatcaaaaaaatatatatatagttaataccaaaatatattttggaagaaacaaatactataaaatctgatttagcaatataaaagtaatattaattttaatgatttgcctgattcttattcattcatagacatttgatgagcatctactaagtaaagctgcaggaaatataagtataaattagaaactctttccaccttaaaaatatgcttgtgggtttactggagaagacaggtatttaaacatcagcagcttttttctaccagtggcaagatttatgttgactcctgaacagtctctcttgaggtcttccttgctaccagagacacatgcacacacacatctgtatgaggattagccaggtggggctgttaactcatcactggatcacagcacaactatccttcccccaaggttataactgtacccacaaccttataacttgcctatttttctgtgatgctttaatcatgcacagatgtatgattaggctataggcaaaactcatgcaaaacgtaataaaaggaaaaggagaatgaaactaaaacagaagtccctatcattattacagaacaaaaaaagagagagaaaatggactaaccgcttagactagattttggaaaataattgacagttatgaaaaagaataagaacaaatgcttacatagtgttaaccttgagccagacactgcaggtgctttatatattttgcctttttatcctcaagaactctataagataaatactattattatcttctttttactgatgaagaaactgagacacagaaaggataagcatggtgcccaacattacaaattgggtaagttcttgggcctgggttcaaattcagatgattgcgtcagaatcaacactctggaccaccaccaggacatctgtgatacaaagttgagtaagtactgaccaagtcacccctctttgctggcaactgcacctaatgttatacatatgtatgagaacatgtggtatttgcttttctgttcctgcattagtttgcttagaataatagcctccagctccatccatattgctccaaaggacaggatctcattttttcatggctgtatagtattccatattcacaaccaatctataaggtaaatcttatccccacttgttaataaaggaaaactaagaacagataactattattgactgggtttggatgaaaacacaaggctatttgaattcaacacagtgtgcttttagggggaaattgtctttggacttcagttctgtgaaagtacaagtcatatcttatttagtttagattctaaaaccatagcatgtttttattaatttttaattattaaggatacataatgggtgtatatatttatttgatattttgatacaggcatataatgtgtaatgattcaatcagggtaattggggcatctgttacctcaagcatttatcatttatttttgttaccaacattctaactccactcttttagttgttttaaaatatagaataaattattgtcgagtatagtcatcctcttgtgctatcaaacactagattttatttattccatctaaccatgtatttgtactcattaactatcccatagcatagagccccaaagcaaggattttttttctactgcaaattgcatcaatttgaattaaaagtgaactaatctaagtcccttttttattcaagaaaataaatctagtaatgaaagaggaaaattatatggatcatccctaaggacaagttttataaagtactttaaaaaaatgtatgagatgtacttaggattcctgcctagtaagccatttaatggaatctttgcactggtcttaaatgcgtctgtgtactgcttgaaacctctatcactcctttccttttaaatctgttcctcatattaaataattcttacctaggttttcacatgaatggtgcctaggcagatgcaagaagctgctgctagggaaataaaatggaaactcagaaatgaaggaagctgagaattgccaagcagccacagactcccactctatacccgcttcctcaccccaccctttcccacatgtcacatacacattccaattttcccttgcagaggaaatgaagcaaaacacatcaatggagtgaaatggtttgtccctaagaatcagaaaactaaagcttctcttagcaggtacaaaaaaaaatagcttttcttttagttaagtaagactcctaggcaaaacatcaaaatcctgggctcttgataacttttttgacatagaaatatttatagagatggctctttatcaatgattccagaaactgtttgacttgaagttgaaaaatgacttcaaggtataaaaatctggcattagcaccaagatgttgaccctgaattctcttatttttaaagattaaaaacaaactcataactcctcaatgttaaatatgttttctggacccaaaaatgtttttcattttacgttgataaattactatgttccaaagcggactgcttttctcctcctgggaaaaaaaaataatgtatgtttcatattgatattcttctctttttaaaattaacctccaaaaaaagctacataaacacatgccaaaaagtgacatgttcaaagaagaaatgaaaaatgtcactgtgtgtatataccaacctcccgtgtgtatacttttttaatgagatcattattttgcatactgttttgaaacttgttcttttaatttaagaaatatgttctgagtatcttttcaacacagttgtatttgccattctcatgggacttgtggtgaatagatgggagaatttatcaacatgcaaatgaaacaaggctcttgcccgagctgagtgaacttgggccaaggaagatgacactgattaggtgagagaggaaaccaagcttagaaggggcagaagtctgggacctaaaagaggcagccaggaaaccacattggttatgacagagccttttcaaggtcaggaagggaagttcatgacctggcaagcaacaactaggtagatgtaagagcacattaccgtgcccttatgaggagccagaactagtcattgtaagctaagcacttcatgtctattaaatatgtattctttacagacaatagtccatgagctggatccagctgaggattttatagaagaagtagaggctcagaaaagttaaataatttgcctgagatcacacagcttgttagagcagggattgtagtcagggtgttttcctcccaaaggcacagcatgttccatttcaacccacagacaagctttattctttatccagtgccctttttcacaatgtccctccttctgcctctgtacttgtacacatggttaaatataaattcatctcccagaaaatcttcaacaggtcttggtgcaaaagactcagggttcttcaatgagctcaatgcatgttaactggtaaatctcatggcttatgttcatggagtatgtgtatgtgtgtggagtgtgctagagtgtgcacccatgagtctagcatatgtttatacaaacatttgtgtacaaataggtatgtgtagatgcacatacaaaattataaacctcactgatcttaataaccattttctacatattttcaaaggcagggaattaggtctatgacaactaggtatcaaactttccaaaagctaataagagatgatttacggctaacacagacacaagagaagtacaaatgcaccaccattaaaaatatctgatgatggccaggtgcggtggctcacgcctgtaatcccagcactttgggaggccgaggcgggtggatcatgaggtcaggagatcgagaccatcctggataacatggtgaaaccctgtctctattaaaatacaaaaaaaaaaaattagccaggcatggtggtgggcgcctgtagtcccagctactcgggaggctgaggcaggagaatggcgtgaagccgggaggtggaggttgcagtgagtcaagatcgcgccgctgcactccagcctgggcgacagagttagactccgcctcaaaaaaaaaaaaaaaaagaaagaaagaaagaaagaaagaaagaaagaaagaaagaaagaaagaaagaaagaaagaaagaaagaaaaaaaaagaaaaaagtctgatgaataaatcttcatcactgaaattcagaatacaagtagaaaattccgtctatgtattggagtttgactatatttgtgaaggcacagtatataaacacctttcaggaattcatctgttgctttaagagaagtctgagagttttttcttaagcattttcaacataataaataaactactatttgaacacattttgctgggtcttctccctgagatattttacaaattatttggatcgatagtacaaaattgcagtcaaaccactaggaaatgggattttaagtcagtgccttagcctcatcacacatctggaggacaccattcccatacccttcctaccttgttcaattttaagtcttccatggtggtacctccatcgtctgagctacaatatttgtttttgcaaatttggagggttgtactaacagatactctctacatttcttgcttttttccctattctctcatttgccaccgagtctttcccttctctttgaacacgtctgtaagaatgatcttgcagtaatatacccaagaaaatgcctcctttatctaagtcaggaagagtgttcttttaaaactatgactgcgaatctcaaatgggcactcagcactgcccggcaatcttctcacatttgctcggtaaattcacttccccaggctctgataagactatatggtatttcctttctccttgaaatatcaattactccccaccacacaaatgcttttcacctcaccctacttcatactaactaagaagaaagcagttggacacaatatctctcaacttcccattatggatacaccaatatctaagcctatattctctgctttccctagcatataatgcagagacagagaggctttgctgcaactaaagccaactcctttacaatatcagggacctcagtggttttttccctatagcatccccagcacctagaagagtacccagcaggagctcagtaattataaattcaatgaatgaatgaatggatgaatgaatgaatatctatgactatgaaagattctatctgtcctaaacggggaggaggacaagcatcaggacaaacagttttagggtgatactcgacatctgtaggacatggatagataaccatatgtaaaacaaatgataataaataggagataatattcacccttgcctcatctactctgtctgtcttatctggcttcttacattgtatctaataattaatggttacattcataggatatattaatagagccagctaccttccattcatctctataagtcttaacaacagtgaccaatttacataagatgaaactgaagctcaaaggagtcaagtatgttacccaatgtcaactcttaaatgaaggaggtagggttcaagtctatggatttttttaaatggtaaagtccatactctctccactcagccacgctgtcaatcagcccctgagaccttcctgtaagtccgagttcaactgagtttcttagccaatccttcgggaaataggactacattctactgcagtctactggaaatgtcatgctgtcaaataatcccatcctaattgtgtcaggcatgaagtctaaatggccacagagataggcagagagacagggggacccctaatgggaactttatatctaccctctgtcttataggattggatcttgctttctgtgttcccagtcatgaattttaatcatgtaagaaaagacaagatcttttaagattacaacaggagcagatcttggtattgtgggatctgaaacacatatgatttggggaagtggggtctatgagaaaagaattaaaaaatcatatgtaaaattgggcatggaagttaacatttatttagactaggaatgggaaggggtccatgcatttgaaagtctctgtagcttaatcttcatttacttcaaacctaattctgcctctgatcatgatctagccctatctgggaggcaggaacacggtggttgagagcctttgttctccaggtgggcagcctgattttgaatcccgccttgaccacttctagttatatgatcttaggtgagtggctgaaatttcacaagcatatactttgtcatttgttaaattttcaaatacaactggatcataaaaactgttaatatgaatgatcatataaattcttgatcatagtgcctgacatatgctcaacaaagtgctcattaaggtgtgtttgatattattagcatctaatgccatcttcttgcttaccagctctggaacctctctatttgagactcccctactatattcatttgatacctcctgaatgcctgagcaccaggcacttaggatttgactctgtgtcttcccattatgtaccttcaacaacaagatctgggccctaactccctgctgaaccaaagcctggttcccagcctcactacaactgtgtcatcgcattttggcatacctattagttttataagaatccttgtttctgcctgtgtaccagtaaaccttccccattttcctgggcataatccaataaaactagaaaaaagtaatatcatgaaaagcattcacaatagatttttaagtgaagagctagaattcctataattgtggctaataaggttgtttttacagggatatgcaaaaatttaatactacaaatatgtaaaatggtgaggtcctcacctagaatataatgatcactctattatagataatgtaattattacaatatgtatgctaccaaatagcattgtgatttctaacaagtcaattaaccttcctgggcctcaatttactcataaaatgaggaagctggactacactttctatgattcttgctagttccaataaatatgtattagtacatatacctgggatattaatgtatcattcacatctcaacttggaatgtgcccaatttgaatatttccctttgaagctgataagtgagggagaaggaactactcaaaggataacaacattgtcttctttttttgtgtgtgaaattcacctttttacctctactgtcacaatattctcactatggcaagtgttcaaggaatattatttgacttttcgaaattccttctctagtaaagtcctattaagacaattaacattgctcctaaaagtgtaattataagtgtggtatatatcccagcttgttgaagcaacctggtaagaagaaatgaagactagacctgctcaccccatgtggaaggtagagggaaaacctagatcaatgaagagcagtgaagttttggcttgcgctcacacgaaagattgggccacaggcagttgtttcatataaaggaagtctgaaaataagtgttgaatccatgccctggtggtatctggtgcagagcaaagaggtgtcttggagtaggcagctatggtacagaaacaatatcagggcgtataaaagaaggtagaatcaggaactgtgtagagactttctatttgaacccttcaatggctttccagtaacaaacagtaagttctaaagtccttataatggccctgtaggatatgaccttggctctccctccattgctcctcccattaccctggcaagctcactctgcttcagctacactagcctgcctgtgctccttggatatatgaagcacacttctaaccagagtctcttgtatgtggcggttcctttgcctggaatgctcttatcccagactctctcatgtctcatgcactcatttaagtattttcaaacaagtcagttctttggaaaggctttctctgacaaccctttgataaataacaccctgtttctgtccccatgctatattttgtgcttgtctctattaaatattggattatatattcctatatattcctttatttatatttttgtcttgcttccccaatagtatatacatttctcaaactctgcaactgtgttcatatactgtgcttaggacaacatatggaccacaatagaggcacatgcagttagtgaatgaatgaatgaatgaatgaatgaatgaaatccactacaactactttgattcttatttttgtagcatttacggtttgtatctcaaaactcagcagatgaacttgcaagaatggaggctttatctgttctgcttatggctgaatccccactgtctagaacagtagctggcacttgggagttctcaatagataatcttaaatgttgtttaccatgaaaaagttcttgtactctagttttaagaacggaaatgaattgttctttgattttggtaacaagtcaccatcagaaccagttttaaactcaacccaatcaatcaatgacaattttgcattagtaaccatgctttggaaagcctaaaactctatatagcaacagcagtgtttggttttgagtgacagcatcttacaagcacagctctcacttgtttaccaagcaatgaagcaacttttggtttaaggcattgagctgtggtctctctctctctctctttttttttttgatggaaagatgatggttcttagctataatggcaaaagacaaataacttattataatcttatacagggttctaagcatatagaaataccaactatattaatccacaaaacaagcaggagagggaggtgctatgattattccaatttagtagacaaagaaactgaagtactgagggttggagtgcttatccaatgtctacagccaaggtgtattccagctgggattattattaaatccaattattttggcttcagagtctgtgttcttagtttctacattctatggcttccctatgagaactgaaacacacacttgttataattccaggagccagatttgtcttgatgattagtctactgacttaatcaaatgcttttcaaataattgtcataaacagtctggccggtgggggtgaatttcaaacagagaggtaagggcagacatctgtgggatggtggcaccaaagcaagcagttaggaaggtacagaatttagaatttaataatcggcatgttgaacaattaaggtaactgccctcgtgacttgtgtgtgtgtatatatttatatatgtatgtgtgtgtgtatacatacacacatacataagtacgtatgtgtgtgtgcgtgtgtttgtgtgtgtataaatatatgaatttctggtaagtcaagtgctatatcaaatatgtgtatatatatatatatatatatttggaaaggagatgaataattgttatttgaatgtggtaacaaatacccaccagaccagttttaaacccaacccaatcaatcagtgacatatatatttgttataggaccttggccttccaaaaattcatctgtggggtatctgaactggctaccagatggtaatggctcagtattactaaacgtattcagacaagtcatagaggtgaaaaacacctcaatttatggctaagtccctcagcctgatagttctttgtaatggcacctatttctaaccttaaagttatgccaaaaagcaacttcactatcactcggccctaaattcttggaccataagcagaataacaagagagctacaatttgaataagcattttatgaaacaggttatgtttgaagtttatcttctgaatataattcattagctttttctttgcagaaaagagttctgtcaataaccaatcatttttagttcatttcgtctctctgggactcagtttccttatctataagatgatcaatttgaaactggcagtttctgcaggatgttttgttctatgaaaccttgaaaaatcagagctacaattatgtaaattactgatatatcttctcttatttttccctcttcctcatttttctgggttcactatagtacctatgcttttactaatgtctctacatagagctagaagcaaaaaaaaaatgaatcagattcttaaatacaatttttttaatgggcatattctgtaagagaagttcatactgtgtatgacttttatgtatctctgtatgttttatcttacttgggaatatttatcttgtgcagtcacaatgaatgccttttggattggcgctacaataaagatattggaattaatctagactccttcatttacttccttgtgatcttaagcaagttattattctccctgaacttctagtttattcatctgcaaaatcaaaatatcactttcagtcttgcatgattgagatgataattccaaggcgaggcatatgcaacactttttttcatcctctttgtcttatacaggttctcaactaaggtaagctttcttccctcccttgtactctgttctcaataactagaaccatcagtgctccttcttgttttttacttgctgagaaaggttggggtgtgtgttttctgttgatgaccatcttcatcaagccttaaaacccaattgatgcttgtgttatgctttaattcaatgctggatgcacttacttcaaaatattactccaatatggatcatcttactgccttcatccatgcttcagtcaacccaatccatacatctcagaccttttcataaataacagtcgtcctggattcaaggtctcactttttctcagtagcatcttatgttgaatttcctcctttctccaatcaccagcccttctctgccccatctatttccagccatcccatttgtctcccaaagcaaaacagatcgactctcagtttgagaataaacatttctgtctattttcttttcaaattttaccccagatcccaactaaagtgtgcgcttgatttgactgaaatttaatgctgatttattcatgttacaagagtttgtttaatttataacatggtgcctttataatattattttactgtgtttagaagattacagtacacatgcttatgcttgttaaataatgtaagtgattgagagtatttcatgcatagaatgcgtccaagaaaggcttgtggaaaaccattaatggatgcctaatttaacactttctcccctttgcaaaattattagccattgcccttgatgttgtaatgcttaggaaatgaaaattatgtaataagatacggagtctgatggcctgagtttgaattccagttttatgacttactagctgagttaaccttgatccaaattcagtggactctataggtctaagttttcttatatctaaagcgtaagtgattacctatctcaaaggatttggtgaagattaaataagatatagccatactatactatattacatgaataatatatctatactatactctgtttaacacatgtctgacatataggtgataataaaaagatattaatattatttataattgttttattttatagctaaaaattaggattatgtcagtcaaataatagtctaaaatcacatgactaataataagtgaagctgtgattagaatccaagttaaataactttagatcctctgagtgtaatctctgaatatactaaatctttttcttccaatagttcccttttaggcattaatgttcttgaaataagaaaagatgaaccataagagaccctaaaggcggtatatgtattccctttatttcattactagatggtgtaaaaagattgtatgtttaagttttctaatataaagtatttttctctttcttaaactttacagtttacaaagacttctctgataccccaaaacacataagcgttggcatgccattgcactggaggaaccagaatgctgggagaattagaacaagactctgtgaatttcaactaagctatttgagatggaaatcagcccctcctagtcatctctggccccttggtccttattaagcaacatggtctgaacacgccatcagtgatgtttttgaatttgcccaacttactgacagatccagcacttccccacttctgtcaacagcacagcagaattaagaacttgggttctaaaaatccatctttgtgtatacagctaatattttgattaagcctcttgggggaagcttgtattacagtattacagatatttgctaaataaggtgagttgaataaatacaaaagacagcctagtccttaccctaagaaggacttagattaccagttgatttctttttgtctttttatcaaagataattaccaataacagtgacttttttcaagtcatgtgtgataatgcatttttgtgaaattttgcttttattaagggtggtagaaggatggttctttcttaattcagtaactgcttcagcataatttaatacatatttagatgaaaagtagatattttcacagcccagtgttacatatagagataatgaaattgctttgccattaaaattttgattcaatttctccctggaatgcattaacagaaaaccactttcatttttatagttgaaagaaaaaggcaatttactgttgtgaagtttcaggagtattccaaaccagcataattctggagcctcctaaactccccactaagtagagagagtctatgaatttaaaacactggccacaggtattgtgttttatccttagaaatctgcttctcattattattttcatgcctactgcactggcattaagattacttttcttcaaaagaaaatgtaataaatattaatggaattaccaaaaaagttaataaatgagttaataaataataatatgatgtgcttacttgttattgaaactcttaagtttcgagaaacggtatcatgaggatgcctgaaacagcagccccacacgtcaaattctagagctacaggaaaggatgtttctctattctcttgaaatacaatgaatatttccctgaggtatgatgaattatcctactatggaagagaaggaaagattagtctaaccattatactgtatatcaattccaaaataggccgctgatatctattttatggtaaatgatatgtgttacataaattctcaaattttaatttcctgttacactcattgaagttttgaaattgaaagttccatggagattatcaagcccagttttctcattttagaaaactagagaggtaaagtgacttaatccaaggttagagaaagcaagagagtagcagaggaggcataagcatttgtgctccaactactattttatattctcaggagaaagaatgttacctgctaactgtaactcttgggttataaacatatgacatggatctctgtgtagtattatgtattcatgaatatcacacatagatcagaacaggacccaagactcaaggacctaatccccagtcttctacaatgaaggagaactcaaatcacttaaagataagcaaatacaaataatttaaacttttatattaccaatttattttgaagtacatgtattctacacatagataaaagcaaaataacaactacattatacaaatgtcatattttatatgtccttcagaacaatatgcatatttcaaatataataatacaaaaaaactacattgtgaataccatgtatactataaaacagttgtaagtttacatgaggaggtttaatgatttagggaaaaagttcacaatcatcctcataaggctttaacctaggttcaagattttctacttaatattcaaattctttcataggacaattgagcagacagaaataagaaaggtgaaataaatcattatcttctgaacttagacatgcaaaatggtgcaggaggaaaggaactctcaggcgaaaagaaatcggaatgaaatgagcatcagtacttttttttaagaaagtttcagaagaaaactatgaagatgctagcttgataataaacattgcttatccttctattaattaaaattaggctgtaactgtagagtgcacacattctgatctatagacttaaactacacacaatcagctatatcaatctattcatttgttttttatctccagctagcaaagtatttagtcaaattaaatcttgttttaaagggcttctcactctaagatttactttggagatttgtcttatacagacttccaaatgaaaaacactattgctttctatctctgtcaacttttattcattaaatatttcttccttaatgtggttatcaacattttactatttataattacttcctaacaatcactggaaatcatatatgaagtttatattaaagtttctgagatagtgcattctctccatagtattagtccaagattgtcctggagaatgctgatattgtaaaacgtaaagtacaagagagaaattgttcatacaaatcagtacagctttgaattcaagcaataataaaaaggaaagacttcatagaggttagcagctcttagaggaaggaaacacaagttctcatttgggagagggaatatttgtgctcctgaaacaagcagaaccaatactagagtaggtgtcatcaccaaatccagattcaaagccttccacacaagagctgaaagaatggccacacaacatccatgaaatgagatgaaacaagtccctcaacagagctaggaattctgagattgttccatgaattgtcagtctcacagagaataaaaaccagttcattaaaatgggacatcccaatcacatttgccaactaaaataacacacacaaatgaacagagaagccaaaccaagttactggtttcatgagagtgtacaacatgaagtcagttttaaagagcaatggccacttctagattttagaacttatcctctttctagaactacagatatttccatcagagagggctaccaaaagcattctgcaacttattttaaaattaaataaacaaacccagctctccaccatcccccgcctcctgcgccctgcatcccccgccccatgagttataaatgtaggtttctggtaacctacatcagagtgacacacttattttaatttgatgtttgctatttgtaaatgcaatctcatttatgttacactgtggcagccattctctggagggctggattagttgtggatgtaaatacatttataatgtattttcctttttacttaagtttaaaatttgaagcaaggaaaatatctaaacataactacgtcaaacatcatctagagcttcttttaaaaattgctctgccaactttagagaaacaatgactggctgtatgcaaacacactctcaaaatgtgttctgagcagttagaaaattataatgtaaatttactcagattcccagagaaacatttaatttaggaaacaataaggacaaatacaaaatgtattgtttaaacaaagaggtgattgataaggagaacaggagaacaagcctctaatgaacataaacagcaatacttgaaaaacaattggctacctggaatctatgttaaagtctgttatatgagttagagtcttttccccttagaatctctgttagcatgtaaaataggtaacattataaacacttctccagaagactttatgaaaagcctgtcattctcaggctccaaccttagaccataagaaattatgtctatttatttccatttgatcaatgtatttgcatagcaagaaatgagtgatctcacaatatacccaaataaaatttgccgatacaataaaaggaggtactagataaaataatcaagcatcagtatggactaaatactctcaaaataagcaggtagatccattacaaacccttaattacttcagtttttgttctgacatttttgatccaaagtgtttctcctagttttaacattctcttgtgaaaacattactgcaacttacaaaaagtttatttcattaatctttcctaccctgaaaaacctggcttccttcatgtccatcccagagtaacatttctctgatctcatttcaggtgcctcttacattcacctaagacattttcattgcaaaacagagaatttttagaagtcactaaaaagcactcccttaccttctaaacctgcttcaatcagcccaaactgttccaataatttaacaaaaagcacaatgacgatcagaactgctatcatttcaagcccttccaagttcatggtcagctaggtcatggtccgaccacagccactgagaagtgctcctctgcctggctttctttgtaaagccattaaactacattaagaaggctactgctggagaaaggggaggaggagagcgtatgagagagagagagagagagagagagagagagagagagacagagagagagagagagacagagagagagagagagagagacagaggagagagagggagagagagagagaagggaaaagagactagatggagatggagaggctgagaaaaagggcgtgagtgacagaaaatgcattcatcctgtctgctgtagcagaggccagaagtagcagccggataaagtcgggcctgtcggaattatcggcttcctcattatcactcttgcacagagagacagccacgcatgaagtcgcggcgcagatcacccgaggacccaggaggtcaccaggaacgtcccgaggaaacatgaggcccggcgcggaggagatggctctgcgccccgggactctgcgcgccgcgccgccgccaccagtggctttgttgggccggccagttgccttggaaacaagagaacccaaggaagggctggactcctgctgcagacagggagcagagcaccgcaccttgaaatacggagaaaaacctgaaaacgctgagaggtggagtgacaacttgcattcagctgtttcagaaacattgttgaccagtaaggaaaatccaaatgtgtattttgtcccaactagctgagtgcagattgcaacgaggcttaagggagtccttcaatattgactttctttcccatgagtcaccttatccgaaagctcagtcactgagcactaatattctggtttgagtagtaactatcatatctttttgaagcatgggaataataaactaataagtattcatcatatttgcatagtatcttagagtttagcagctacctcctctgcactacttcataccattcaatacaccaaaatatatacagtatttaatgtgtccttctatcctttataaataatgatgtaagtaaatttggagccaggaaaagtttgagaataaaaaaaaaaaatctgaaaaaaagcggaagtttttgtctctctcttgcacaaactgtttcatctttttctttcctcctaacactgcccaaatagattagctccacaatgaaatacagaatttaaaaaaactacaagagagagacagcatcttagaaagccaattaaagtctcctatttcatagatgaacaagctgaggactgaagagagcaaaagaaatgaggcaaaaaggcagagcaggatagaatgaaggcatccttcacttggggttggcttttgaggcagtggagtataagtttagaatataaactccagggacagactgctgggatctcttactagctgtgtgaccttaggtaagttacttaacatctcagtgtcttaatgtcctcatctatgaagagaggcataatagcacctagctcatcactctgttgagggaattaatgagtgacacttttagaaaagagtgagtgctcaatcactaccacctcgggtgcttttcacaagtgtctccatgctctactcagactttgctgggttgccagaggaatcaatctggaggaagtgcagtcctcctcttatcattctcttaatcagaaaccttccatggctccctatttgcctacagaacaaagttgaagctcctttgaagagcatccttttctctccgtgatccggtacctccttgaggattgcacctcagtggtcttactcctgtcgatacactctacctgacagctcagcttccttcacccaaactcattctgggcttttccatttctaggactttgctaaaattgctctatctatttagaaaaaccttcttacaccatctctgcctgtcaagctcttaaaactctttcatggaaacttcaaccagaattggatcaaatctctcttttttgtgtttttacggtacttttcctacttatgatgtattatatgatagccatatgggtatacattctctccattaaagggtaggctgccagagggcagagatcatgccttgctaatctagatagtcactactgtgcctccatggagggcacttcttacttcatagatgtttgctggataataaaagtcatcaatgattaggtgattactacacaccagatgctttaatgcattgctccttcctagacattctaaaagtagggatgatgatttgcaggtgtaacactagcctcagagaacctaagtagcaggctcaaggtcacacagctggtgaatgacggaaccaagcttcaaattctgatgtgtttaatgcaaaacccattacttcatcccattatccaacagggctttaaatgaattaaaaatccaaatattggcacaagtgcttatcagcatggggtgaaggttatacccaaaatgatcccccacactgttttgtgacattcttttttttgagagagagagacagggttttgctctgtagcccaggcttgagagcagtggtgtgatcacagctcactacagccttaacctccagagctcaagtgatcttcctgtctcagcctcccaaagtgctgggattacatgcatgggctaccgcaactggctgacacactgttttagccattaactccggtaactttggaacatgaaaagcatccaaactagtagttaattaaactcaaggatctttcttcctcctcattcacaggattaatattacttaaacacacaccacctcggaactcaaaagggagttgtttttctagtacagtgaactctgcagagcccttcagcttgccttatatatgaatgtccatagtcaagtgctttgtgttcacatttaaagttgatgacctggggctgagaaacatatgtaggcaggaactttttttttttttcttgagatggtgtttcactcttgttgcccacattggagtgcaatggtgagcgatctcggctcaccgcaacctccgtctcctgggttcaagcaattctcctgcctcagcctcctgagtagctgggattacaggcatgcaccaccacacccagctaattttgtatttttagtagagacggggtttctccatgttggtgaggctggttttgaactcccgacatcaggtgatatgcccaccttggacccccaaagtcctgggattacaggcgtgagcaactgtgcctggcaaccgtgccgggccggcaggaactattgaagagcatcagagtgagagtccttccacttggtctggatgtcaaaattacgggttcctttgctgttatgtttttcatcccaaggcctgagggtttttctttttttaaatgtttatgtcattagctccagcctttgtatttccctctcttgcagtgcttatccccatatcttcccatgagtaagtgacttgacttaggtcttagttccaaaattcctatcacagagaggccctttctaactgtactatatagaaaaacctccctcacctggccctggaatcactaccctctgaaccagtgttattttcctccaaagcattgtcaccacctggcatgtatatttgtttattaagtgtctccttctgccagaattgctacaatataaactcctacccatgagggtagagatttttgtttgtcttgttcaatataatatcctcaatcccagaatggtgcctggtgaataagagggagtgagtggttgttgaatgaataatctgattgatattctcacctaaaaagctacctgctctctcactgatctggcagagcccaatttcctgttaccagcatgcctcctctgcctggggagcctgagagatttccatactttttttttaggaagtcctattcctactgcttctttttaaggtgagccatgagcactgcatgctcacacatattagctgtgctctatcttcagcatttaatgtgaatatgatttgtggttcctgcccacgtgaacaatgaaagcaatacaaggaaggcagccaagaaggttgccctgcccaaaatatcttaaaatcactggtgtggatgataagtaccttggatagcatccactctcatcccttcattttcagctaaaagaacactgcagtctaaataagtaaagttacttaactacatatgcaactcttaccttcaagtcgcagcgtggattcaaactaaaatattaatccaatatattttcttcctgtagggccttgaattcccttttaaaagagaaatattaagagcatccaacagaaagaggaaacctaaatactggctccaaatctttgtcctcgtttggattacttaaacttgctaagctttggtttgctggtcttcaaaatgaggccaatatccctccttcagggaagtgttgtgaggattaggtgcaataatatttctaaatgatacttaatctccgtggagcacatacgttttcaagcagtgggcctaacacatagaatcttcctttctaaatacccctctttgaggaagagaggggtttacatttccatcttatggatgaggaaacaaaggcttgtgaaggactagtcaatttcccccacatcccaaagcatctgaagccagtggggctgatagctgcttgctgatggtcataacattttcccatgtgtctcatgtaacagtggccaggaatacccaaagcattcaatgaaacaaacatcaccagcataagtaacccaacacttgatagtgactttttaaaagatttctcgccctttctgcattaatgttagatacaagaaagttctgtgcccctgccgtgtgagtgtgtgtgtgtgtgtgtgtgtgtgtgtagcagataagtatgaagcggcagtgagagaaaagggacactgttgtgacagtttgccaaaattttcttctctgcaatgcattctcacgtaactactgaggagggtgagaggctgtttcaggcgcccccatttaaagaagtttcttcaaagcaattttggggagtccttcagctcaggctctactgctgcatgaaggttatctcttgcctgtccccagaaaaatgaacgtgcttagagacactcttacttttgcacttcagagcgtacccctaaagtgcagtttattcaaaatcaccagttaactcacagtaatgaacccatttctgctttgattccagcaatatggcttttggaagaaaaataatgtttataaaatgaaagattagtttgccctttgatgaactgaggcagggaacaaagggattttggcacgttatgtctctctagattccaggctgggaaggctttaaagagaagaagagaaagggggcgaactttctctacgctttcaccacagagtcccagtgagttggccttctcaagacctaaccttcattcagtttgtttctgattgttcatctttcattcaattgctaaagttgtggtccaggtactatataagccagtatgagtaataaaaagatgaatacccatttttccatgagctgattattaagtatttcatacctgtacaaaaatatcacttgtagcccataaatatatctatgtactcacaaaattaaaaattaaaaaaatatatccttagtcttcactagcttaaaatctattaaaaacaaaattcagatgataatagctcatgtgtgtagaataatcactatctgagagactagcacacggagcactttatatggattatttcactgtatcctctgtaaaccctatgaggcagctactaatgctatctccattttgcaaggggaaattgaggaatggaggcctcattgggttataccaggaaatatccagctcgggattgaaacccaagtctgactccagtgatcaagagataatattttagatgccattgaaaacacctgaaattcaaagcagcatctggtaaaagtctttaagaaagtatggaaagtaccatgagatcagggaaagctgacaggctctaatggtagtggcaggtaggggaatcgaactaagatcagctttatagagatcacgttgtgctgatactatgtagatactaggtggtatttttcttttcataggaaaggcaatgtatattacatgaccaatggagaagaaaactagtcttgccagatattttttggtttttttgagacaaggccttgctttttcacctaggatggaatgcagtggcccgatctcagctcattgcaacttccaccgcctcccaggttcaagcagttctcctgtctcagcctcccgagtagctgggagtgcaggcgtgcatcaccacaaccagctaatttttgtatttttagtagagatggagtttcaccatttctagggctaggctggtcttgaactcctgacctcatgtgatccgtccgcctctgcctcccaaagtgctgggactacaggtgtaagccaccacacccagccttgccagagaatttacccagagcctgaaagaacagtcaaagcccatctcaaatcacttgcccaggtgctcctggaaagtttcttcccctcatttttcagaccatctcctattctggtgcgcaaaatcagcatcagtgacctgcctttaacttcctttggcacttacttgatccaagagaagcctggctgaatcttaggattgagtgaatagaaagcaaatttgacccttcaaaatgaactgaaagaaaacgagcagaaggcaaaggcatcacataataaatgtatttctttcttcttcttttttttctttttttgagacggaatctcactctgttgcccaggctggagtgcagtggcgcgatttcgggtcattgcaagctccgcctccgaggttcaagccattctcctgcctcagcctcccgagtagctgggactacaggcacgtgcacgacgtcggctaattttttgtattttaatagagacggggtttcaccatgttagccaggacggtctggatcgcctaacctcgtgatccgcccgcctcgacctcccaaagtgctgggattacaggagtgagccactatgcctggtctgagaaatgcatttcaataataatgtgaaaagacaatgagccgcatttatggcagaggcagtacaatgcagaggttaagagtatgcttgggtttaaatccccactttgtttctttagagccttgtgactttgggcaaattgctgagataagtcatacaaagcacttagaacagagactgtcactgtgtaaatgctcaataaatagtagctgttattgttatttattgagctcttgctacacatcaagtactgttctaattgaattatcttaatatgtccatataacaaactcaatgaaccaagtactattattattcctagccactatatggataagaaggactagggcatctgcaattgaggtggaattctaaggaaaacacattgcttatacccacccatgaagctgaccaccatcttcaccacgagtaatataggaagaaattataaacttataatggcttggtttttaaattgttcttcttaaaaatgatggaaaccacctgttatcccagcactttgggaggcctaggtgggcggatcatgaggtcaagagatcgagaccatcctggccaacatggtgaaaccccatctctactaaaaatacaaaaattaactgggtgtgatggtgcgtgcctgtagtcccagctacttgggaggctgaggcgggagaatcgcttgaacccaggagatggaggttgcagtgagccgagatcatgccactgcactccagtctggtgtcagggcaagactctgtctcaaaaaaaagaaaaaaaatgtaaaaagcctgaaaataactatcttgaacactgatatttgaggacatctttgtcaccttccattctgaaacatttcacaagatgaacagatgcagtgaggtgttggcatgacatcagattacagattctactcaaattcaagtggggtttcaaagggtcctatcatcatttccttgaggaaacccaccttcaagggcatatttgactgcttcataagtctcatcagccccatgatctatgaatcacaatgtagttctagactagtctagtcttatttggtctagttccatgactagacaatatccttaatgatgaaggatcaacaccacacccagacttcaccacccatccttgtcctaagaataaatagcaaacacaagctgctcagtgggtaaaggtagttaaatggaggaacaatagacagggactcaaacaactcatttgagctgtacattaccacattcttaaaggactgaagacaaatgggaggaaaggaattggtagcaagagtgtccagcactggcaagagagaacagagaactaagctgttatacatatgtattgactcgtggtgctcaaactgttatgtgcatcagcattaactagaaagctccctaaaaaggaatcctcagacctttcccagagattctcatttcataggtcttaggtagagaccctggatctccatttttctcaaaagttctaatgattcttatgcaggacttctctggaccacactgtgagaaacactgcattaatctgctcaaacaccctcacccatgtaaggaacacattctcccagctcttcaaaactagctgagagtcacaccttttacaaacttgacatggttaagaatagacgggggttccttcggtttctcatacttctctggaaagttttttcttcgaataaaagtaaggcattttaaacagattgggaatagacacaagtttctattccatatttaaagggttttgtttgtttgtttttattcaggtcattcatttcctgcattcatgacaactttctctcatcaatgagctttagataccaactttagtagagacagaggactgtgaatgatcccacacttttctgcatcacttcataacctagctcccatctttgatctgtccctggagaatccgtctttcagctccaaatgtaatcacttaagtgaagggcagaactgatgtgcagccatcttaatagccaagctaagtgaagtaaatagaattgatagatacaaatgttcagaagtgtgaagctgatttagataaagtagatatttcagtttgagatctaataaaaagcaaaacagcagccacatggagccctttcccattactccctgggtctaatctttatctaaatcaatactataaaagtaacaaaagacacaaagttgtctgatgcataattcacttattatgaactcatgtaagatgcaaataattgaaacaggattatttatgtgatcattaaacccaagggtaatttcaacagatttttagccctggttaataaaaatcttagttgtggatacatatttagccagatttccttccaaatatcgtctcctccaacaaattattcctcattacagctgacatgctgtacttcctcactgtaatagagtataaataattgtttatcctattattttattgcaccaaagaaatataaaatgtaaaaagcaatatacaacaatctccttgacaattattcatgtttatatgctgtagtttaattactaacaattctaactactcacttgttattaactttgattttaaacacaaatatttcaaataaaaaacctatgataaccaagttaaactagaatcgaattatgaatactaattaagtatatattttatttgaaaaacacacaggacaccgttagtagaaccacactgaaaagaaaaattatcctcaatgcaatggaaatgtaacccattaaataatacaaagtggcctcaaagaattaaagattagcttgtatggataactgagagcatgctatgttaagtttattatgagcagactaaaactctcttgaagggtcatcaaaacaagccagtcaagcctgacctgctggtttgataactcaggatggcacctctctgaactacggtattgtttcacagttttctactgctgcatagcacatcatcccaaattgagtgacttagaacaacacaaatttattatttcacagtttctgtggataaggagtctgggtacaggttagcagagtgctctattcaggcttaaatcaagatgtaggctcgggctgtgatcatatctgaagctctgtgtcctaagatcacagtttgttgaaaggattcacttccttgtagttttatgactgagttcccctgctttcttgctagctgttggacagggaccactctcatctcctagacattgctcttggtgccgtgttctgtctgcaatgtggtaggttgctctttcaatgctagcaagaaatgtcttccatgcttcaaatttctctgacctcttttcagggcttggccgattaggtcaggctcacttgggattgcatccctttggattaactcaaagtcaactgattaggaaccttagttacagctacaaaatcttttcacccatatagggtaccaaaattatggtagcaatatcctatcatagtaacaaatccaattcacacttgaaggaaagggattatatagggtgtgtacatcagggtcattttaggtgtgcaatcgtgaggactattctagaattctgcctaccacaacaggtttccactgtaactgctgagtggcatgctaggtgttctgtggttgtaggaggctgaaggatatttttttttatctcatgcatttttcaaactatatctgaggggaggctcagcatagaactactggacatttggccactgaatgcacagaagccaacagaaagatgtaaagtcctggagtgtaagctctctattaacaagtcatggtaacaaggaaaggagaatggccagaaaatgccaatgcaaaactctggctacctagtgtggttagactatatgttgaatagctggcttcatccactgaaatatataaggcagaaagaactatctagaaaaggataaagagtaccatatttgggaccttaacactgtagcttggggctccatttcttttagagcagattcttcttgtatttatagttttatttttatttttcctgcttcctgttgctctgctctggctatgtttccactacagttatggctgatcttatgatctattcacttcctcaagttagatgatagtgaaatactgcctggacacaaatcctaactggatacttcactggctacacagctttgggtaaataccatctttcagtctcagttacattacctatacaacacagatagtagtaacatctcagagttgttaagttgaaatacagttgacccttgaacgacataggttagagccccacagaccaacttatacacagacttctatctctgccacctctgagacagcaagaccaacttctcttccttctccctcctcagcctactcaatgtgaagatgacgaagatgaaagcctttatgatgatctacttccacttaataaatggtaagcatagtctctcttctttatgatttttttaattttttttactagcttgctttcttgtaagaattcagcatataatacatatacaacgcatgtgttaatccactgtttgtaatagatcaggcttctggtcaacagtaggctatcaatacctcaatttttggacagctaaaagttatacacagattttcaactgtgggggggccagtgcccttacctctgcattatttaaaggtcaactgcccttaaaatacatcaagctcccagacagtaccaaatcgacattaaataaatactattgttattgacataattagtacaaggtgggtgttatggttattttgctcccaaggtatacccagaatctagggccatgtctgatttatggcatccactcaacacatgactgtcacaattctgtgaagcctctcttcccttctgatctacccactgtataccttgttgtcaaagtgaaaggaacatgtaattccccagcttcgattttcagtggtattttgctggtatatttcattttgcagaatgaaatccgaagtcatggcaaggcattcaaaacccctaccaactttccaaggaactatccatcctcatttcctgaccgactgtgttcacactctgtgttcaggtcatgagaaactactgctgtaacccaaatgccagggtgattcctccaactgcttccttttccttctgagaaattcttacccatcatttaagaatcagcttaaatccttccacttgggtggaggctttcatgagcccatcttccaaagacaagattaaccccttcttctttctgctttgtaactatattcaactactatcctttcaagatttatgagcaggttgacatactatgtcctgtacaaaactatgaatcctggggaggaagggccatatctgatttatatttctctcctcagtacttatccatgtgcctgaaatatattagttgatcagtaaatgttgcagtaaatgaaggaggaatggaaaggaacaaagaaagaaaaaaatgaatggcatgctatctggagggtacaaggaagatttaagccaaaagcataaccctgcaacaaaaatcaccatgtctagaattcaaccattaaagatttaatttttcacattaagcatttcaggtgtcctgaaaataactcaaatggcagaaaactttaatcattaacaccatgatataacagattttcatttgtcacctttgcgcatgaaaagtgagaccactggcaacctgggaacttgaagctggttggcactaatgtgtgaaggctatgttgagagtcagtctgatagcaagtacagaagcttaaccagcaaaatagctagctagttgaactggaaaatccagagttattttaagacaatgcagaacgttccaggacaatccagcaaatcaccaatatgctaaatgatgcttcttcctcctgttttattttctatattaactgtttactgtattgaacattcaaatgcattgtcttgaaataattatgtacttgctaccaccctactgattgatacaggctgccaaattattaaaccaagtttacagaagtcagcttctgttctgggaataactggctcggggttttataatatatattccatttctttaggtacccaaaaatgcccagcatggtattctcaaaggtaacatcagtttgttcttatgagctgctctggccttcacatttcttaggtggccattcaggagatacttacaagacgatttagtgttcttgtgggatataaatgcttgccattagcaaagggaaaacttggcaactggtatggagtatcaagtatttcaaatagtttttactattgagttggattttatcaaactcttaacttacatgccaactatccccttttcatattttaaatccttaatgatttaacataaagtccatcagcacattttgattgatgaacatagaaatcatttttattaactaatatgaagttgtaaaaatatgtttactattctgtgtccaaaaacacctttaataatttctccatgggtctccttattttgagaaaaaaaggtaacaatttatggaggaaatcaaatgagcaaatatctatttaaataaactaaggatttttcaaggggttgttaacgataatgttgacaacttggtaaataagcaaacactaactcctattatacatataaggtgacaatgtgtgactataaagaatagaaagtgtgcatatttatcaagaaatcattgagaagctatattatggttataatggtgctggccttgcagaaacattttggagatcctcttttgagaactgatatggtttggctgtgtccccacccaaatctcatcttgaattcccacttgttgtgggagggacccggtgggaggtaattgaatcacaggagcaggtctttcccatgctgttctcatgatagtgaataagtcccaggagatctgatgtttttaaaaacaggagtcttcctgcacaagctctctaactcttgtctgctgccatgtgaggcgtgtctttcaccttccaccatgattgtgaggcctccccagccatgtggagctgtaagtccaataaacctctttattttgtaaattgcccagtcttgggtatgtctttaccagcagtgtgaaaacagactaatacaggaactgtctttaaatccgatttataaatcatcctgccctgcctgctctagctgacacctggctgccctcagactcaaactttccaaacctcttcaaatcacattttgatgatcactgatttacttcttgtaaacagctttaccaaagagggagacattttaaaaaagacaggtaaaatgacacgcaagtaacttagctattctcattagctcatgtaaaggtttgctagggaaaaagattgaaattaatggttagaataagccttttgtgttatcattaaatttcaattatgtacaatccttgcttacattacctggaataattggaagttcacagcatcattgtgagtcaaagcaatcctaataattaatttcttgctactcaaggtagaaagagcctctataattctactctatttggaaaaggtatcatagattcactattcacttaagccactgactttgaatgtttgaaatgggattttgaaaaggtcatttttctatatattttatcagttatttgcttttatattttttgagagttatgcattgtgtatataagtactgtgccactattgtaccaccaaatagtggaagcgaaaacgacacactactcgtgtttttttctttctaaaatcctgggtttttttgcagtgctttttgatatgtgtcttattaactgcaagtttatacatgaacttaggattcatttgttaaagagcctgagcatgaagagaagcttatttttctcttcatgagtgtaatcctgcagttttacaaggttagtaaaaaccctcttgggtttttatttttcctggacattagaaacatgaagagtctttcaatgagaaattatttgaaagggaattatatttaggccataaacaagctgtgaaaaaaactcaacataatccctcctgttaaaaaggttgaactccagaattttactaaattgataatggttgtacacacctgtgaagaatgaggaacaactctaagcagatgacctatcacgacaatttaaagagagaacttatgaaataagttggagaaaaatgcgctaaaatacattcaacgaggcgcgaattctagcctggcacttagggcctgctctatccacaggcaaaggaaaatggaaaagataaatctaaagggagccaagacctgtctgcttcccaaggtctaccaggcatggcttgatcatgctggctttgcttacagctttgatcatttggttgcaattgacaggtacttggacaaatcatgtctgcagtcagaatggacttaaggaataacaaatcaacagacacatgctatacacagagtgaaccttgccttcagccttgctgtgaacttatgctgcagttcttataactagttttccccttatgtctaaatccatagtttattcctagtacctgcctctcaattacccagaatcttttcctagaaactcttctaatgctaccaccactctgcagctctggaggctgccttctcctggacattccactgttatgtctaggcccatcatatcttgctgaattcctcagaaatttgaatcacctagtagcctgataaatatctatgcacactggatagtcctccccttgtgaaggtaaacttctttctacccatggtcaagaccatccagtatattctcctggccaccctacacagatgcacacaagacacacacacagatccaaacagacatcagtcaaaaacttttccacaacaatcagctcacttccacaaaaacagaatcctttagggtgtgtttttgttttacaaaactggtcgtgtcccactaatggatagcaaaatcaacttgatgagttcatgattagcagtatggaatagaaaagaaaaagaaaaaagaataggatagaactggtgagtgttttgcaaatagaaaaggcattattttgtgaaatccttttcagttatatttatttgtgtttttctatatgttcctggttatgataaaaaatgcacttcttactgtagttcatcatcaggaaagttttctaaaccatgtattagagcatttggagagaaaagcatcatttctacagttaaccttattgaaattgtaaatttgtgatctgaaacagattacacattaaaccagtacttcattacagacacaacaacaaacacaatttcatctgataagcaagttatcttcaaggaagcagataagcagagtttggagggaacaggcatctaaataattacattttgatggcacaatgaggaaataatctctgtgattgaatggtttaccaatttaggtgctctggcctgaaggtgcctggctaagcaggggctagcatactcgggcactgggaaacttgaaagagtgagtcaaggaaactatagagaagggcttggcataggtgagctccaagtgtataatcattctattgctaacaaattgtgttgggtagaactggttaagaacaatgatggtgagatcttatatgtgtttatgtgttagcattttttaaaggatttttctacctactatattgttttagtgaggcatcttagatgcaaaatgtaaggtgatgctcattctcaggatttgcaattaccctgtgagctttgcttgcctggccccagtctaggtcctgtacatgagatatgacagtattgattcctaggccggaagcggtggctcatgcctgtaatctcagcactttgggagaccaaggcgggtggatcacttgaggccaggaatttcagaccagcctggccaacatggcgaagccccatctctactaaaaagacaaaaattagctgggcatggtggtacgtgcctgtaatcccagctactctgaaggctgaggcaggaaaattgcttaaacccgagaggttgcaacaaactgagatggtgccactgtactcaagcctgggcaatagagcaagaatctgtcttaaaaaaaaaaaaaaaaaagaggaaagttagtcctacagaattttagctgaaaggtcatgaattgtggtaaatctgagtttaaacctttggcctcctgagttctggaaaaaatgcattttttaatctacttcaaaagacctcagtaagaacttattctgcatacatttgcaaagtaatgaactggcaagataaagagccatactatggttatttgttatgaaatgtttgttcagaatgaaagaatggcaaaatgcagccagcaaggtttcagccttgaatcctgcatttagtttgaggcacttccattccagaaagacaaagacaaattaaaaaccatttagagaatgataaaaagatgagtagggaaaagaaaggtttgatttatgaggctagattaaaggagataaatgcctattatgtggctaagtgacaaccagggaagataagaatctacagatattgggaagatgtaaatataggtaatagagaagacatctaagtgttctacaagatagaactagtaagaaaaacggaataaaatattaaatgggtagacaatacgaagaaggcttttggcaaaaggattaagtgggtagcaatacaacatggaagatggaggggtaggaggaggaagagggagaagaagggagaataaaagaacaggagtatgaggaagaagaaaatgaaggaagaaacaaggaaggaggaagggaaggaagaatgtgaagagagagaaggaaggagagaaggaaggcaggagggaggcagtgggagaagtggggaaggagggaaggaaggaaagaagggagggagggagagaggaaggaaggagggagggagaagaggagggaaggagaaaaagaagaagggaaggaaggaaaggaaggaaggagaaaggaaaaagcaaggaaggaagaaaggaaggagggaggaagggacagagggaaggaaggaaggaaaaaggtgggaaggagggagggagggagagagaaaaggagggaaagagaaatggtggaagggaaggaagagaaggaaaaaaggaaggaaggagggagggagggacagaggcaggggaggaaggaaggaagaaaggaaggaaaggagggagggaggaagaaaaggagggaaggagaaaaagaggaagggaaggaagaaaggaagaaggaaggaaggagggagggagggacagaaggaaggaaggaaggaaggaaggaaggaaggaaggaaatgagggactatgttttgtcccactgtatttaacagaaaatataagaaatagatttctggcagttctaaggcagaatgaacatctttccagaaacctgagccagctgaggagatggtatcaacaaccaacctcaggggaggaggccacaactaaatcagaaggagacagtaatgaggagctgaagtgggcttgcaaagccattactcctattaagtccagggcttgtgcacaggctacctgccaacttttggctagcctataacacataacagttactgtaattgaaactgaattataataccatcctggcacacattctcccctaaaaatacaacacataataatgctgttaaaataaggacatctggaaaacaatctagagtcccattgtttgtagctggcaccggccttctaaaggagtccttcctgcttcgttcttctactgtataaatggtgacatggtgaaaagggacacttcatttaagtgaatccgaagtttaatgtttgttgagaagcaactagatgccaaacactataccactcctgtttttgttaaataaccatctatgtgattcagattcatatccctgtcacaagattaaaaatctggtgtcaaagaagttaagtaatacattctaaatcacttaaaagataagagaaataaccagaaatagaattctagactgcttgtccttgtcctcaaaatatttccattatatctaacagcaatttgcccaaggcataacatttagtaaatgttcaattaatatgtgcataattgataattgtgcagaattgaattaaagggaattgatggtataactgaaatctaaaaagaatccctaatgacttctggtgatgaattgatgaagtgttgccaaattttcatcaaatgttgaagtatgtatgagtcaattatggccacactgaaaaatggcatctcttttgtaagtatatatatatatatatatgtatatatatatggaatacatgagatatgtatgcaggcatgtggtgtgtaataatcaaatgagatatctctaacctcaagcttttatcctttctttgtgttacatacaattcaattatgctcttagtcatttcaaatgtacaaattagtgttgactgtagccaccctgttgtgctatcaaatactagaccttactcactttatagaatgatattattgtatctattaaccatccccattctcccagccccagtacccttcttggactcttgtaaccattattctactctgtatcttcatgagttaaattgttttaatttttaactcccacaattaagtgtgaacatgcgaagtttgtctttctgtgcctggcttatttcacttaacataattacctccagtgtcatccatattgttgcaaatgagaggatctcaatcatttttatggctgagtagtactccattgtgttaatgtactacatttcctttatccatttgtttttgatagacacataagtagcttccgtatcttggatattgtgaatagtgctgcgaaaaatatgggagcgcagatatctctttgatatactattataacttcctttcctagcagtggaatttatggatcaaatgagttttagtttttttgaggaatcatcaaactgttctccataggggttgtactaatttacgttcctaccaatagtgtactagtgttcccttttctccatatccttgccagcatttgttactgaatgtcttttagataaaaaccattttaactggggtgagaaaatatctcattgtagttttgatttgcatttctctaatgaccagtgatgttgagcacttttcatatatctgtttggcaactataccttttcttttgagaaatatctactcaaatcttttgcccacttttaaggtgtattatcagatttttttcctatggagttgttttgagttccttatatattctggttattaatcctttgtctgatgcagtttgtacttacttttccccattctgtagaagtttcttcacctggttgactgttttctttgctgtgcagaaatattttaatttgatatgattccttttgtccatttttgctttggttgcctgtgtttgtggtatattccacaagaaatctttgcctattctaatgtcctggggaattttctcaacattttctgttagtagtttcaaagtttgaagtctcagatttaagtatttaatccatttttatttgattgttgtatattgtgtaagatagaggtctagttccattcttctgcatatggatatccagctttcccagcaccatttatggaaaaggctctcctttcatcaatgtatgttcttggcccctttgtcaaaaaatgagttgagtgtagatgtaagaatttgtttctgggttgtctattctgttccattgctctatctgtctgtttttatgccagtgccttactgtttttattactatagctctgaaacataatttaaagtcaggtaatgtgattcctccagttttgttttgtttttttcttttactcaggattgctttggcttttctgggtcttttgtggttccacataaattttaggacagttttttctatgtctgtgaagactgccattggttattttgataggaattgcatcaaatccatggattgctttaggtagtatggacattttaataatattgttttttcaatctatgaacatggaatatatttccattttttatgttcttttcaatttcttgcatcagtgttttatggttttcattgtagagatctttcacttccttggttaattcctaggtatttgattttatttgcaactattataaatgggattattttctggatttatttttcagattgctcactgttgacatatagaaatactatggatttttatattgactttgtatcctgcaactcacataatatgagtttggaagtattccctcctcctaatttttcagaatagtttgagtaggactggtgttaattcttctttaaatgtttgatagagttcagcagcgaagccagtgggtcctgggtttttttcttggatattttttattacatctttgatcttggtacttgtaattggcctgctaaggttttgggtttctttgtggttcaatctagtaggatgtatgtgtctgtgaacttacctacttattttaggttttccaatttattggtatatagttgctcatagtagcctctagtcatcctttgaatttctgaatcatcagttataatgactcatttttcatctctgattttatttatttggttttctctcttttttgcttcattagtctgtctaaagttctgtcaattttatttatcttttcaagatacaaactttatgtttcattgatcttttttactgttttctttgttttcttttcatttatttctgctctgatctttattacttcttctactaactttgggtttggtttgctcttgctcttctagctctttaagatgctttgctggattgtttatttgaaatttttctactttcttgatgtgggcacttacggccataaattttcctcttaagactccttttgctatatctcataggtttttacatgttgtgttttcactatcatttgtttcaagaaatttcttaaatttccttcttaatttctttattgacacacttgtcattcagaagcctgttgtttaatttctatgtgtttgtatagttttcaaaattcctcttgttactgatttttagttttattctattgtggtcaaagatgatacttgatataatttcaattgttttgaatttttacagacgtgtttgtggcctaacatattgtctatccttgagaatccatgtgcttagaagaataatgtgtattctgcagctggtagagataatgttctgtaaatatctaaggttcatttagtctatggcagattaagtttgatgtttctttgttgattttctgtctagatgatcagttcaatgttaaaagtgagtgttgaagtctccagctattacattattgtattggggtatatctgccattttagctctaataacagttgctttatacatctgggtgctctagagttggatatacatatatatatatatatacatatacgcacacatatttgttatacccccttgctgaattgatctctttatctcttctttgttctttttatagtttttgtcttgaaatctattttgtctaactgtagccaatcctgctgttttttggtttccatttgcataaaacatcttttttcgtacctttttttttcagtctatatgtatctttacaggtgaagtgtgtatctttacaggtgaaatgtgtatcttgtagacaacagatcattgggtcttgtttttttgtttattttattttttttaattcagtcgtctactctgtcttttgattggataatttaatccatttacattcaaggttatcattgataaatagagacttacccctgccattttgttatgtgttttctggttgttttttcggttttctcttccttttttccttcctttctgtcttccttttagtgaaggtgtttttctctggtggtatgttttaatttcttgcttttaattttttgtgtgtctgttgtaagttttttgatttgaggttactatgagacttgcaaataataccttataacctattattttaaactgttgttaacactgattgcataagcaaacaaacaagcaaagagaaaataaaagttatgcattttaattcctcctctttttaaactttttgttgtttctgtttatatcttattattgtattgtgtcttaaaaagttgctgcagttatattatttgatagacttatcctttagtgcttttactcaatatatgagtagtttacacatgacgattacagtgatataatattctgtgttcttaatatgtttttctgtgtgcttactattaccagtgactttgtaacttcatatgatattttctcattaacatacttttctttcagattgaagaactccctttagcctttcttataggacatatgtggtgttgataacattcctcagcttttgtttttctgggaaggtctctatttttccttcatgattgaaatgtattttcaccagatttgctattctaggataaatttccttcagcactttaaacatgtcatgccaatctctcctgtcttttaagatttccactgagaagtctgatgccatacatattggagacctattgtatgttatttgtttctgttttcttgctgcttttaggatccttcctttatccttgacctttgggagtttgattattaaatgttttgaagtagtgttatttgaggtaattctgcttgatgttctataagcttcttgtacttgaataatatctttttctagtttgggaagttctctgttattatccatttgaatcaaatttctacccgtagctctctctctatatctcctcttcaaggccaataactcagatttgcccttttgaggctattttccagatcacgtaggcatcctttgttcttttttaattctttctgatgtttttgtcctatgactgaatattttcaaatagtctgtcttcaagctcactaattctttcttctgcttgatcaattctgctgttaagaaagtctgatgcattctttagtatgtcaattgcatttttcaactcaagaatttctgcttgattctagttaattatttcaatatatttgttaaatttatctaatagatttctgaattccttctctgggttatcttgaattaagttgtgtttcctcaagacagctattttgaaattgtcatctgaaaagacacataactctctctttccaggattggtaactggtgccttatttagttcgtttagtgaagtcatgttttcttttatggtcttgattcttatgggtattcattgctgtctgggcattcaacagttaggtatttattgtagtctttgtggttggcttgtttgtacctgtccttcagggaaaggatttcaaggtattcaaagagaccttggtgttgtgatctaaatttttggtcactgcagccacatctgcattagagggcatcccaagtccagtaatgctatggctcttgcagattcatggagatactgccttggtggtctcagataatttctggaagaattctctggattaccaggcagaggctcttcttctcttccctcaactttctctgaaacaaacagagtcactctttgtgtgctgaggtgcctggagctgggggtggagtgacacaagcacctctgtggctaccaccagttggactgtactgagtcagacccaaagacagtacagcactggtgccttatttactttgcccaaggcccacagtaaccactgcctggctacctgcctgtgttcactcatttctttagggcgccaccatcagcctgtggcaaatccagccaggcttatttccttcccttcagggcggcaagttccactggtcccagacaggtccagagatgacatccaggagccagggcctggagtcagaaacttcaggaatctacctggtgttctattctactgtgactgagctggcactcaagccacaaaacaaagcccttcctactcttctctgtcctttccacaaacagaggagtctcttccctaggccccaggccaatggtgagtaccacctggctaccccaggtgttcactcaaggccccaggctacttcagtcaccttgtggtaaatgctgctgggccatgactctccattcagggcagtgggctctagcccagtgcatgttcagaaatgaaaaaactgcatttcttgagagcaaagtatctttgccttctttggtatttaagttatcacaagtatatactaggcttcctcagtcttgcaaaagcaaaaaataaacctaacatctgaataatttcaataagtgctaagtctgtgtaaaacaatgcatgcacataataatgactttatgccttctacgattgtatgctgactgataaataatactgacaactaatatacaacatttaattatctacaatattaaaaaatactgttttatatacttccaagaggatacggaaaaacatacacagtttccatacttattgaacttatgactgtactggcaggcaggatatgaatgcatgaaaatataaaaataatcaagttttaaatacctatttgagattttcttttcaatagattttactctactaatatttatggaatacttactacacatcagagcttgtgttaggtatcagtatacaagaaataatacaatgaggttatttctttcaagaactccaccatctagaaggggaggaaaactttcaaacacacagttccaaaacatcatcagcagtacagagaacggtatatggtgctatggaattcagataaggaaagccttaattctgctgacagtgggtctgaaggtttatcaaggaaggcttcccaaaggaggcgagactcacattaggtcttgaagaatgagagtttcccaggccaaaaagaaagagcactccaagaagaggggatattacatacaataccatgcaggtagaaagattatcgaagagggtgacagactgggataattatgataagcattgttagcctaattactgttattcaatggggaagatgatataaaaacaacctaaaaatgtcaattttacattttttcaggtctaccagcttgtcagtataaattgagatgagctcaaggcctccttaagtagaatcttaacatggcaactaacatattaacaggtttcccgttcattaccgtaggataattcattaaaaaacaatgtattcagacttcataagcaaaagcataccttcctctttagtctagtatatctaattatatgaggactgctattaacattaaataaatcatctaatagataatttaaatgtgcagtagtgttcaaaagcaagtctactttttcaaaagtaatcataattgcagcagaggcatcacgaaatatttgattagtacaacgctaaggagtgagaatcatttcttacaaatgtacaattaaagaagttgtcaattatagcataaattgatcagcatgtatatgatacaaaaacatgttaacccgaataagtttagactatcagaactactgttgtgaaatattcctttgaagcattgactgtaaagaacacagtggaatcaaagttataagagctatagataataacatttatagttacagaattctgattatatgaattccatgaattaaacgttgcaccatccactttcatacaaaaacaaactggataaatgagtgatgacattcattttgccagtttacaaggtacagaaaagctttgtgtattaattctgtcaatgagaaaataataaataattttgtatttaatcctatttgaatttaattgaaaccctatagagcattccgcatgaatggttttcaacaaaaaagtgatgtccttaaagaataaggagcttaacttcctcttcaaacataagaagcagtgccattgaacttgcttactcttacctcaagtgaatgattacctcttgcaaatgaattttagcagaattttccaactccagcctcagttgtttctttttgctatttgttttgttgctttttgaaataaagcttctcttccttgtgctttgcccatcacttgtggcaggaatcaatggtaccctaaagataccgactcattggtgcagaaagctaaaacctgcccctttaaagcccaacctggatcaggaccgaaattaaataggattaactcctaatttgttcctgtgtcctactcttctattgactgtttcccagtccctaatagttgtccttgttcatgtgtaagacactgtgtcctcttcttccttagttaattgagtctttcgttttgactttctattctcaactttgactatttttttttgctctgtgggctaaaactaatatgcagatacagttttcccttcctgatctcaatagttcatagtttctattgagcagcttatactacatgtcacttcagagcaatttcctttaatgcttttatgaaatttccctcaagatgctttttaaaatttattttgtgtcttccttcccttcctttcttcccttgttctccctctctctcaatccttgcaaacacataaacacatatacttttactacattatcatgttcctgttgatattgtctctaggaatttcatatgcaagtatatattttgtatctcattttgacaacatgaaatctatgcacaaggagtcatctatttcctttgcccagaagctggggcccagtaaattgtattgagtaagcaaaattgtttggctcatttattcactagtttgctcattcattcaacagatatttattaagtgtttgatatgtgtcaggtcttatactaagtgctgaattcaataatcaatatcgtcacaagaaatattgccttacatatgtcctttttatggaacattctcttctaccttgtttttctagcaatttctgctcatctatcatgattcaacttaaatactaggttttccatgaaatgtcttctaatctttagacgtttatcagtttcttgtctttgctgtcatcctagaatatgggatgtttcatatttcacagtaattataaattcacatgtctgtttcctcccaattagactcactttgtgggaagagacatgatctcttccccagtacttgtaacaatgcatggcacatagtaggtccttagtcatttgtatacatgataataagagcatctatgtgtacaaaatttagtagaaagtcaacatccagcagtttaatagcattattcataatcaatcccaaaacaagtgattccaaggatctataaaattttaaaagctagtgttaatccagacaagtttatttacataaaatggaatcagaagcagcaaacttgattgccccgtcctctagaatataacctattcagaagcccattggaactttatattaacccctctgttgggaccagatagatactataagctaattaatatggtatattatacggaaattaacccaaggattctgatttttttttattgttagaagaatgaaacatccccaacaatttgcctatgcccattactatttttatggtgatgactccagatttacacctccaacagcattccaagtctcttatccatctcaatggataagacatgggaccagttatgtcccatggaataactcagagatattgtaaacattatctgtttaaaagagaactgtcaattctaccttcaaacctcccttcaatcccctctctgtaaatggcactgtccaacatctcaagtcagaaacacaggcacagcaaccctgacttggtcttgattccactttttctatctccactctcatccaatccttaacaagccctgctgtcttcatcccaaatagattaaacccttctctccatttcctgtaatgtattacatcagtggagagtcccatttcttcctgtgtttagtactgaaacaacttcatatctgtcctccttgtttctgatcctgctgtttccaattcaaagcgtttcttaaaatgtgtactatatcatactgttcctcaaaacaatccagtgacttccaattttatttagaataaaatttcaaattctttttatggtttatcaagtattacctgcctctctaattgttcttacaatgtttcagcttcaattattttctttgaactcctgtaatacaccaaggtctttaccagctcggagcctttgcacaagctgttctttcttcctgaaatgctgtttccctgaagtcctttcattattggttctttcttagcatttggacctctgttcatattatctggtcatgctcttgaaatagatgtcccttcaatcccacagaaacatgtaatttttccatttttgataatttgattgcttcttaattctcaacagaattggtgattttgctttaataatacttgtctttattcatgtcttacttgttttccctcctagagtataaattttttttaggcaagtactctgcctcccttgtaagtctttttacccccagggaccagtatggagtaaagcatctaaaaaaatgtgtgttgacaagcaaatgtgataaaataaaataacctaaaattaaaaaaaaatcagtaagccttaattgaacaactactttctgcacacagatatatatctataaattcatagacctttaatattcacaatagcactgtaaggtacgttgtatcattctcatttaattaatgtgaaaagcaagtttctcaaagtgttagtacaacttttggattttaatgtaagttcctgaatctaatcccagtcttttgtattttttcgttctatactcccaaagccataatttaatttaaatatagtttttacctcttgctgacatttaaccattaaatttttttccaccagttaaattaaaaagaaaaaaaaagtccatggcaatacatactggcattctgtctttgaaaacaaccaaaaaaaaatcaataaaaatcttctacataaacctgccgtaataaattaaagatgtgttaaaaggaaagaatggatgcttctgttgataaggatcatggccagtggccaaaaggcaatcttctgctgttctttaataactcggtgcaaaaacttcggaaatttttataccactactctatcatagcactttagtaatagattacaggaagtaataagcatgttattttcctaagtgtgctaaattgtgaaacaaagagttcttcatccaagtgcctactgtctgttgcaaagccagtttaagaaaccagctacaaaaactcatctttttttttaaatccaataatcattcatagaacacctaactggcaggcagtggcatggtggttgagagttaaagctcagaaatcaagggttcaagtctctcctccactctgtgccagctgtatgacactgaataaattattcctttttctcattattaaaatagagttaataataatgtctatctgatagggtcatggggggaataaaagggtgaaatgattaaaatgcccactatgtactaagatctccaaaaaaataatgttaactttggcttcagaatgatgtgttctgaggggcataagtttatgatactctgggtgttgagaatataagtattatggaagggagagcaaggtacccggcagagtgaatggagttaaataaccttaaggtcttttaggaacaagctattcccttaccattttttaaaatagctttttttgaggtacaatttgcacatcataaaatttacccacttaagtgtacaactgaatgatttttaggaaatttacagggttatataaccatcaccaaaatctaacatcagaatgttttcattgcctcaaaaagattcctcatgcttacttacagtaacagccgttcacacccccaccccaggcaaacactagtctacattctgtctctgtagatttgcctcttctggatattttatataaaatgtattatacagtatgtgatcttttgtgtgtgacttctttcagatcatataatgtgaaagtccaactctgtggtagcatgtctcagtttgcttctattgctacatcatgttccattctgtcaatataatacattgttttgatcaatcaccagttgacagactctggagttgtttctagattttgacttcgacaaatcatgctagtagaaacatttgtatacaagtctttttctacacctgtgttttcatttctcttcagtacattcccaggagctctccttttccattttataggaaagctctgcccctgaaagaccccagtgcaacttgttggaagtgggtagagttctaattccaactcaccagtaactactgagtagtcagctcacacaatttagtaggaaaaaaaaatacacatcagttcttgtctctgccctttttcccctaaatccccttgtgactttggaagataactggacctcatagcatctcggcatcttaacttgtgaaccaacggctgcaactagatgttctctgaactcttttaccttaaaaaacttataatgctcttagtaactaaaattttataaagaaatccagaaagcacaatcaatggattatctcccttgcccctgaaattttctgggcatagccagcacatagcacagtcacaaaaaaatatgataccgaaagcatttgaatattgtctattgcatgcagaatccaggatttaccagttgccaccttacacgtgcctgttttgctcttaaaattcttgcatatcactgtatttatctgtccacattttgctaaggcagttattttgttcagagttaagtgggcataaaacaaacattagtacaagaaaataggtggattgttttaataaacatttaaaaagtataaatccaagtaactactgttacctccaaaatagtcacctcactggatttacatttctttattctgatatcactcagagtatacttggatatttccctttggaactgccctccaaactagtggtatagccagtttctaaaattaattttcaaaccttattatgaaatgtttagcttgtagaaagaagtataaagaataatacaacaagcatgcatgtaccaatcacaaagctttaaaataattgattaccgatgctctggggtctattagtaccctctctactttctctgtccttatctccaataatttctgcacttaagcatgactgtcctcacacatatatttatatttttttgcatgtggatgttaccctatgtaatatatgatattgctttcctagtttgaatatttatataaatcgtatcaaaatggtatcaaactatatgtattatttatcagtttgctggattcactcaatatcatgtttggtgaatttatttacattgatacgtgagttctaattcgatattcaccttgtataacattaaatttttaataaaccacaattatttatcctatttcctattgatatatatttagatgatatctagtattttgctaccacaaacactttagctgtaaacattcttgtatctatcttctctgtgtacttactgaggggttccctagagttacctttacctagagtttcattacctaggaatgaaatttccagatactgagaaatgaacaccttcatttttactaattactactgcattttctccaaactacacccatttttattctattcatcaaggtataaagctcccatttgtgcacatctccccaaaactcagtactgttagacattttaattttcccagttgccaatttgattcttaaatatcaaatttaaccaacaatacatgactatgtcctctgaatatacctctgtgcttggttctgtgtggaatgcaaaacatgatatagtggcagtactactgaaattggaggaaccaaaaattgagccctcactcctgccgtctgtgaaaacctgagcaagttgtttaacctcttcaagtctcagtttcttcatctgtaatatgaagggatggacaggaaaaattttcaagctcctttcaccttccgtcctacttgactttatgatgctctctgggagcttataagactggaggagatgcaaaacacacatacgcaactttaacagcacacctaaatatacgtgtagaaggtactgggagaacacagcacacaggatctaaataggggtgaggaagaaactagaaaggtttcaccaagcagattgaatgagattcaccaagatggtatggatggaatggaggaaagacatttaaggagaggaaagagcatggcaggtggggtcgtaaaagaagacagtgaagggagaggggcaaggatagggaaaggggcaaggatatggagagaggcaaggatagggagaagggtgtggctggagcaaaaggtgtttaggtacatgctgggaagcggagaagatgaggccagttatattgtgatttttattatgtcaaactgtaataaatcttcattatgttatcgataacttgatttttaaacccctcaaagcaatgtggaatcaaatctgcaaataaggcagatagtcattttattttcactttaaaatgatgccatgaaaccaatttcttctgaggccaataggctgattctacagtcacttctcaagcagggctgttcagggggtttgagaaatggaaagaagcattgcagaaaaaagaatggagtctccttgcgtgcaagctttgaacagacatgctcctttggatttttgaattttatcaggtggtttaaaagattcattattttatagttatacttggtattgaaaattctcagaacctgatagaattttagtattcccacataaaatttttaaagtacaaacttctttttttattacttagaggaaaaaaaatgcctcctaagaggcttcaactggctatgctagaatggctgagaattttgaaaaagataattaatgtacctcattttgaataaactgatttattattggttataaacatggacctcacaggcaaaatacctggcttcaaatctggagtttcctattgtaaagtggaatattaatttaagcaagttatttaagatcagtttgttagcattaggattgcgtttggctacatgtaataaaatacctaaatcaatttcttccacccgtgtaagtgtcttgtttttcttatatcataggaagtcagaggcgggctgctgaagaccggctctatggtatcgctagtgacccatgctccttccactttctgctccaccattctggatatgtagcttttgtccttggcttcaagatagctcctttatcactaagcattgcttctggatttgaaaaagaaacaagggagaatgaaccaaaatccctccctttgtaagactttgtatttttaactcgggaggctgaggcaggagaatggcgtgaacccgggaggcgcagtttgcagtgagccaagatcgcaccactgcactccagcctgggcgaccaagcgagactccttctcaaaaaaaaaaaaaaaaaaaaaaagactttgtatttttatccagaagggtaccccactcaagagacttacttaagtcccactggctatacattgtgacatgggaacctggaaaaccattttttttaaatacattgctgagtgcatagtgcattgctatcctaaagaaaatcaggaatcttttagtaaatgatgtctagccaggcatactggcatgttcttgtagtccccgctactcaggaggctgaggcaggagaatggcttgaacttgggaaccaaaggttgcagtgagctgggattgcgccattgcactccagcctaggtgacagagtgagactctgcttcaaaaaaaaaacaaaaaacaaaaataataaacaaaagcaaaatgaaagtcatagcatatagtaataattcaataattcttactacccaaaggattatactaatgtgtaattaataatgttatatatataaatatatatattcctccaagcacacgttaatccttcgtggcccagatcaaataccacatctactaacacccttctctgattctgccactcagattctttttcttcatcacttaatcagttatatttgatgaaacacaaactaatctgacaagtaaacgaaaaaggatcgtattggaaagatacaaaactatagaattcagagtagagttagctcctgtaggttctataggaatctatagaaacatgggaacctaaataagtttcatgggggtaaacaccaccgagcttatgtttttagcttcttgagctaccatagcaggaagtaagtccttgattcctaccaggatccacaatgggattgctcttaaataggcaagtgctttgctgctagacagataaagcatgatcgctgtctactatagggtcacatgcaggtaagtggttgactttggtcaaatgacactatgatagctcagtgttatccaattgcagaaatgcctatttgttcactgaaattctgctgagtaactgtaataagaatgagaaggcaattgtttcagagaaaattgtgtgaataaatttagaagaagtaacacacggttttaattcatagaatgacaggtggaatgatacagtttagacgtaggatatggaaaggcacttactagcagcttacaaagcaaaacaactcgtcaacataatatgcaaattgaatatatttgaatagtagcatgacaaggttacaaccataccttaagagactttttctggtctgttaattgtataaagaagcagaaacaatttcctgaatataggtaatagacctaactatgggatctgaagtggggataaatagaaagggaataggtgggaaaattaggaagacatagtggggaaaaattgcaattggagattatatttaagaagcaaggatggaagctttcaagatctcctatgatttcaagcttgggtgaattggtgctgccagaaaagcaatggagaaacaaaaggcatgataggcagaggaagaagaaaagaagatgcatgtcatgtatgttgagtttgacatcccaatagaatatctctgagaaaatattcagaatttgaattacataactggtgcttaccaaagaacagggctgatggtatagaaaaccttttgcctttcttataattttctacagtttcctctactcttgtattctcatcaatcactcagttattttgcacatgtctagttctatgtaatttctacatttgtctgtataatgttatctttgtaaggtgacttatctctgtacaccataggcactattttccctactttacaagaggaaattgagtgtcagaaagagcctacttacttttcttcttactaacgaatgaaaaggcaatgttaatcatcatttttccccctaatcggtgagctatgaaaaaaatttggggtccatgcaaaatcatcattattatgtttaaactgtaactctacaaatttatgatctcctaaagctttccaagatgtagtatctctctcatctgttggcagatttttcaaatgaattcctactcaatgaaaaacagttcatttacattttaaaaaccttgtcagtattaaccagattattccttctaattattctttaggtctgatcttaggaaactatttgaagccatctgttatttaaattcaagtttattgcacgtaaaagaacagaacttgatttatgttatgtctgatttgttctgatatgtatagaataataacttggcaggatctcataaacagcagttatggtatagtacaaggctgtggtataactgccactgagattcattatcacacacatcttctaagggcatctaaagggcataaacatttcagaattctgtctgtaatcactatatgccctgctgatatgcaaccagaaaaacattctactctgaaaaaaaaaaaggtatatttctagttttcagaacacaaacttctcagatacacaaacaaggctgcagtttagtgtgagactcaatggccaagtatatttgtgggaactaaagcttcagtggaaagaagcattaggtggatttttcagatttgtctcaacatggccagctccgtatattacacagtctatattctatgtgcatagggcagataaaaggctctgtaatttgttaaatagtatcccaaaatattaacatcggtgggaacctcagaatgtgaccttattggaaaatatagggtatttgtggacaaaattagttttgtggatggatggatgaaagtgggccctaatttcaataaatggtgttccataagaccatgtgaaaacacacagcggaaggaaagctatatgacaatagagtcagattttggagtaagtgacaagccaaggaacactgaggattgccaacaactactagaagctaggaagagggagggaaggatttttccctagagctttcagagggaatatagccctgcagacacctttctttaagacttctgggcttcagaactatgacagagtatatttattttgttttacgccacccaattttttacagcagcctaggaaactaacactggttctaaatgacaaattgacaactctaattctgtttgcttcccttacataagcagagaaccacttaaggtgataccatctccacactcctcccatatccttggcaagtaattgtgcaaacatgtggataaaacacatgcattttgatatctttatgcaaaagtgtcttcaaataaaaaataatttaagagaaatgctaatcaagtttaatattacattttaaatcatttcctttcattaacaattcttattaccttcctaaattgcaaattattggcacccaagggacccaagggagtaagaagagtatgacatgatgacaatatctccttcttgaaacacttaaattaaatcataataacctgcaccttttgcttctttcttaccatttctgagatacatgaatcagttcttggcctcaagtctttggcaaagttttggtgggcttgtttacaaactacaaatgctttgtggtttctgctatcaccacagttttgatggccccaaatcctcaatcttctttatcattaatctgatttggagcctgatatcttcaactgctttccgtagttgactgacttgttacttcaaactgaacattgtgcagaatgcgagatctgcaatcaacaaggtgctatttggtaatattaatcacattcttttctttgtgcttgtgtcccctcttataaggactatttttcttttctgccccataccaataagaaacaaggatgcaacaacaacaatgacaacagacctaagtggaatcttggaagcatgcttgcaaagctcatgcttccccctgcataagctagctaagacaaggcacggggtaggaagaaaagagacaagattgtgactcaaaagtgtagatggaggattcaccaggacagacccaggaaggtgggatcctcaaaatgctagaaaaagaacatccatctcaagggtaaggagaggatgaaagagagacaaaagaatagattcatcccctaggggtaaaataattgaacgtcttgcatacatatataatatatacagcataggaaaaaaagttacttgtgactattcaaagctatttttatatcatttcctttaatcttcaaaaaactcattaataaacattgtcactattgctcactagaggaaattgaaagcttaaacatcatgcccaaggacacacagctactcactgctggagttagaacacacttcctctgacaataaatccactgtcctctttccaatttactttagtttataagccatgatttatttgcttttttctgtgctctgagaacttgataagtaaaattacaaatgccttacccaatcattcaaggaaaaaatgtattcaccccttattctctactaatttcatatatgaaacacctaatcgtgttgctaggctcacagcttgctatatcccctacaggaaagaaaaaaatcctgccacttacgtatatgcactttttttttcctctctgtgaaatgtccttttcctgatacaagtcctccctaaatgtcaatactcaaaacacatcattctctgtccattttcttagctaaggggcagtagtctaggtgaaggtgatttaagcctagagctaaggagccctaggtagtatcatgtgttttgaataaaaaactgttcatttttttttctgagccttgagttctccttccaaggactacttcctgctctccacttccataagaaaatgcttcagcctgtttggaaccagcaacataagaatagagaaagaaagggtttatgaaagatggacccaattatagcagtctgcattttcttataatactggtgacagcagcaaacttgtgaagctgcttttaagtctatgataaataggcttaaatagaaaaagttctgcaggtccaaagtcaataaaaatgtacataatgtacttggagttagatagtaaatgaggtcacaaatgcactgaaagtggaactattggaaagccacaggtatatttaggtagatactacttaaaaaaggaaagagagaaaaaaaataagaaaaagtgaggagagatgccagaggaaattcggaaagaaagaaatctatgtactatgtcaacctctacctttgacagggaaagcatctctttagggagttatacatccccatcttgcaagtttattatctctcctcagtcagtaaaatagcttctatcatgttgagcctgttctttattctccttgaaacaattcgacccatagaataaaaatgctgcttgtctatgaaagtctttaccaggatccatgagcccagggcatttccctagaagcagtctttctcaaatttattgtccatgagaattacctaggaatcacaaaatgtacactttctaacttcacccccagaaagtctcagggggagcttcaaacattcacatttttaaaggtcccctgtagattccgacgcaggctcttttttgccacacctgaaacttataggcaggaagaaacaaatgctcagagcccttcctatgtgccagttatagttccaagggctttctctgttctcctgtttttattaataactcattaaattatcacaaccacactccgaggtagatgctatgagacccattttaccaatactggtaaaagtcacagttagtaaataaacataattcaagtctctggtctgtctcattgctgtgccttttcactccatcacataggagtatgactgtctaggaaaataggttaacagaggagacaaagaactcaggaagcatacagttatgtgcacaagacatgtgctgacaaaggactataagtacagtcaataagaattagtggtggattttccaataaccacagaccctgataagtctataggaccaacctacaaaaggaagttgggtgttgggtgaaggactttattggaatccatctaatgtggactgtgagagaaacgttaagttgccaaggagaataaaagcttcatgtggcttgttcactatgggaaaggaaaggtcaagagaaaagtgggacttcagaggatgaggagtgaaataagccctggagccatctgtggatgtagcataagatccataagcacattatttcataggatttgcaatagccaaaggtcttggaaaccaaattgcaaagatcaggagagagttttaagaaacagtggggcagataaattatatttgttgaatctaaaaggagcagccaccaatccaaagaaaaaaatggaatttattgtattctgctaattctgagacagataggtatgatgcaagaaaaagaaaagatggaatgaaccaatcccagctgacctggcatattcccaggtactttcaagtacgttatcttattaaagcatcacaaaatccccgatatgtaggcagaataggcatcagtattccaaatttccagaaaaggaaattaaagtaacaatattgattactgttgttatttttaaaggtaattcttaaagtcatgttgttagtaaatgtaggatctgggactgcccacaggcattctgactcctatgttagtgctctcttcaaatattgacatacacagaggcatagatactacagaactcaagtctgacagaaagttctggtgtccactgcacctatgtattgtgtaggtgtgatggttttaaagatacatccatactgttttcgatattcttctcttccagtggtggagtttacttccccttgccttgagtgtgcattggacttagtgacttgcttctggacaacagaataatgcagaagtgatggaatgtcacttctgagtttaggttataaaaagactgtggcttctgtcttgggagggctctctcatactctctccttcttggatcttgctctgaaggaaaccagctgccatgcatgaggatactccagcagcttatggagaagtccatgtggtgaggaactggggtcggtccacaaccacctgagtgaacctgaaagtggatcttcccctcactcaagcattgagttgactgctggcccaaccaacagtttgtctgcaacttcatgggagatcctgactcagaagcactcaattaactcatgaaaacggtgagataaatttttgttgttttaagccactaagtttgaggtgatttgttacatagtaatggataactaatatagcagggaatcaaatgattttcacatcacaggcaattctgatttattaatcaaaccacatatttaaacagaaaaactttgtcctactccaatggaaacactttttaataaaaaaaaattagagctgtagaaataaggaagctttgactatcagggaaagcaaatggaggctgatggccagggtatgctccctgtcaaaagctggcctcctcaccaaatcacctcaacattgctgaacttgttcccattttctttattatattagcagagaatgcacaaattagagatttaattgagctaacaaccatctccttaaaaatatgaaatttctctgagggtgtttaaatgactagttatccactcattagttagaattaaagcccattacgctcctaataactcattgctaaaatggcctgtgttgagaaatggaggatttgatgaaggcaggtggcatggtatgatttcattttggagcactgtgggggcctgggtagaggtccacagtgggctgacactttggaaaggaatgatgaagtggagagaggcatcctgggtggagtggcacaatgccaaagcccaactcgggcagtgtaatatatatatttaagatatttaagatatcttaaatatatataaatatatatattttacactgcctgagtgtgtatatatataatatataatatatagaaatctgtaatatatattatatatatagaattatatatataatatatattatatataattctatatatataatatatattatatatataattctatatatataatatataatatatattcacatttgtatatatgtatatattctatagtgcctatattctatttatagtgcctataatagccttgtagccaagaataaagagccttttttctactttaaaattaacctggtactcttcatatcatgagttctaatgggccaccctctaaacctaaccaagattcgtaacagaatttgatgtggaaatgaatttcaaactcacactaacaaataggatttggaagacagcttatttgtaagctgggctaaagtctaaagcacagtgccttaatgtggaaaacttagactcacaaacaacttttttatggtgttatcttttaaattttaaggatctttatgcttcactcaaattacattctttagtacattgcttctcaaactttattgtgtatacaaatcacctggggaatcttgttaaaacatggattctgatgggactgaggattatgcctttctaaaaagctcccaggtgatgctgatgctgccgaaactcagaccacacgtacaacagcaaaactataacatacaatttaagagagcaactgtagattttccaagataaaaaagatgactcaatactgcacctcatggttttaggtttttgctacgatcaaaccaccaaatcaacatgatatttaatagtgaaattcatacttctagacttaaacctaacatcattttaattatttttaaatttaaattctggaacaccaatataatggttaagaatataggtttgaagttagaaacacatggattaaatgtttagttctgcaaccttctagctgtgtgacctgcgcaagtgaactagactgagcccaataaagagaaaaccacttcagatatttcaaatggaagagatttaatatagggaacttactgccttggtaatgttaatgcttaggagccaaacaatgaacaatgaggctaccaggagagaatcataatagctagataggggaagccattatcttccctgtggctagaggaaccaaaggagcaggcaatgctgcagtagcctggtggaagctggcaccccagaggctgtccacagggagctagaccctcataggatatgccactactactagagacactggtgaggtgagagctgggaattactctgtctgctctcttcctcccacccttcaatctccctccagtgtattccatgagttgaactcagccatacggctgtcagcagggaagtctgagaaatgtagctccttgtgatgtgaagcagagctagggaggaacaggaaatcaatctgagagcaaactggcaaaggatcaacacagtgagttactgatgtgctctcatactatatccaacgctctaacaggcatctgcagaatatgggtgttgtgtatttaagtaagatgttacatataaagcatggagtatagtgcttggcacattatttttatcagcagcagcatctttttgtaatgtgacagcattttcccccttcattccttcctctcttctcacccattttcctgctgaataagagtagggatcatgtggagtctcagggagataagaaataataaaataatacatccaagctatgccatgagaaattaagaaaaaaaatctgcttgttccatctacatgatagaatcagaaaagcttaaaggcttccactgggcacacagcaataacaagttctcagtgatgtagacttaggagtcatgctcatacctgcaggccgcttaaggaccatcttttggattgtgctgaagacatgggagaaaatgctttcatccacacataaaggccagctgtgtggcctggaaagtgactcaatggaaaggggcagttattcatggtatccttacctggatttcaggagtattgagcttgactggtatatcgatttttttccctcttgactaggaccatatgtgcatgcatttccagatgctgtggtcataactgagaagatatattattatcaagtcactaacagtcttcaatgatgaaaagaactgtttttctcagtagacttgttttccaagttaagttatcaaaagcttacaaaatagacacagttgtctctgccaggttatactgcaaagaaatcagagtgttggcaaatagctcctctgtggaagaaaacataagcaagcatatttgtattctggcctgtgctcctacagcatagggaatgcagcattctgtttagcagttccatcctggttcatcttgtttgggagttagcaagcaaagcctgtatacaacataacagtctccccctgaagacaaccatcacagcttcagctaactcattccaaccttaaaccaaaccatcttaatatagaactgtttaaatagcaaaaattttatggagaagcccattaagttatttataaatgagaagcccaaatgtatagctctgtaatacttcagagctgcgctatgatattttacttattcattacacatttattgagttaaaaaataaacacaaagcaacaatcctagagacttttaccatctggcctatgctaggagccaaaataattggtgcagaaaatgagtgccatgagttctggggaaagagagttagctgtgggttgaaggagtcagaaggtctccaaggtagagaggaatcaagttgggttttgatagtttggttgaagctggccaggtggaacaaatgaaaaagatgcttctgcctgagagaattggctttgtcaattactttgtggtgggaataaacgagttggttgagcaaggagattaaataagatatggttcaagaacctggaattcatagctagtctggctaagttagaaccttgccttcaccatttagtaatttataaataatattggctgcatcacttaatctcaatttcctcaagtccaaaataggaatagtactagtgcttgattcatggggttatttcaagtatctacaaaacaaatacagaggaacaacctaacatattgtaagtgctcagtcaataatcagctgctattatcacttccttcttccaacctatattgagtgcctgctatagagaaagcagaagagtaaattgagtcagaatatgaaatgctttgactgtaggtgaaagtacagacatgttttcctgctgaaatagaggagtcgctggagacactggatttaggcagggacatgacaagggctatttttaagaattaatctactagtatagtgcatgcaatgtgtcattcagcagcgtcttttataaacctttaatgaagccgtagagaaaattgagatgaggaatctcttggcaccatagaaggcatttaattactaagtaataaatttgggggcccttacaaataattgggattcccaccagtgactagttataccccaaggaacatacagactgctaacatggcagccaccagagccctgggtgtttctgggttcttaaaggtagagtgtgcaggggcaggtaacccacagttctccctgtactcaaaatgtggagcaacaaattgcaatggaagtagctaatatcacaggaaatgtggctatcgtctcttcagggtcttcaagtatggggtacaagcacaagggctagcattctcagggacattaactttgatccaaagagctagagcagcagttctcaaacttatgtttctgtgctgatttacgtaatggagtttctcatctagaaaacactcctgtgggtggactagagttatgagcaatgcccagccagctgcctttaactctacctccttctttctctcaataacatgtacctaaatgaaagtatattataattagagaaataattactctaatttatttattaataaagtaaattattcaccaattttggtatgttatcattagtaataaattatttgggaatccaaagaaaactggtatgaacataccaggttatcactgacattttaactaagaattttgagtccaaagactacttgagtcatgctctatcattcagcaacgtcttttataaacttttaatgaaggagtagagatgattaagatgaggaatctcttggcaccataaaaagcatttaattactaagtaataaatctgggtgcccttacaagtaattgagacccccaccagtgactgaatataccccaaggaatatgcaggctgctaacatggccagccacccaaacgcccagttatttatctggcaagtacaaggcatgaaacaaacttctggactcttttctctttgcagactccagtatgaatggtgaatgtaatttaatgtgtcatggaaatgcagagctgtagaactgattattatgcccagtataaatggaagagctctaatctacgagtggaggtgaagcatccccagtggccaggaggacaaccttgcccagtgacctttcctagaagaaggtattgaagtgctaagatgaggatttccacaaatttctgctcaggcaacaccacccatcatcaactgagttaatgcccatccctaaatgtgtgtaacatgggcgaagtgaattttttctttctctgtcatgctcacttcccacttacctgctagagtaagagtatactagcatattatttagacatctagtttttaataatattcattttcatacaacatgaccacaaagaagaaactgttatatcttataatggaagaaaatctgactgtggagaagttactgagaaatggtacatctgcattatgctttatgggtgatttaaaggattttcaaatattattttgactacaggtaaaataactgtataatttatcatacaaatttgaaagcatttgagtcagacaggatattaatgataattaggctgaaatgacaggcataaatgaagagccttctggtaaattaaaatgtagtaccatcctaaatattatgggctgaactgtgtttccctcaaatttatatgttaaagttctaagtctctgatatggtttggctgtgtccccacccaaatctcaccttgaattgtaataatccccacatgtcgtaggaggaacctggtgggaggtaattgaatcatgggggatagattttcccatgctgttctattgatagtaactctcatgagatcagatggttttataaagagcagtttccctacacatgctccctcttgcctgctgccatataagacatgcctttggttttccttcaccttccaccatgattgtgaggcctccctagacatgcagaaccatgagtccattacacttatttttctttataaattacccagtcttgaatatgtctttaaatagcagtgtgagaacatactaatacagtttccatagtctccatacctcagaatatgactatattttggaatagggcatttaaagagatagttaaggtgaaatgagatcatgagggttggccctaatccaatatggttggtgtccttataagaaaaggaaattaggacacagacatgcacatgcacagaggtaagaccatttgaagacaatatgagattatgaccatctacaagccaaggacaaaggtcccagaagaactctaacctgcagacacctaaattttggacttccagcctccagaacatggagaaaattaatttcttttgtttaactcagccagtctgtggtattttttgatggcagctatagcaaactagcatactaatgatagtgattttcattttaaccatcagccttgaaactaatcacatcataagttgaggctctgccataacatcagttatgtcctgaggccatttggttgaataattgataaactgcttgaagcatgaccctacgaatagccctaaccatccatctcaaggcagagatattttatcttgttttattgcctaacagcactaaaaaaagaaaaaaatcttggttccattccaagatggccaaatagaaacagctccggtctgcagctcccagtgtgatcgatgcagaagatgggtgacttctgcatttccaactaaggtacctggttcatatcattgggactggttggacagtgggtgtagcccacggagggcaagccaaagcagggtgggacgtcgcctcacccaggaagtgcaaggggtcaggagatttccctttcctagccaaaggaagccatgatagactgtacctggaaaaatgggacactctcacccaaatactgcaattttcccacagtcttagcaactggcagaccaggagattctctcctgtgcctggctcagtgggtcccatgaccacgtagccttgctcactgctagcgcagcagtctgggattgccttgcaaggctgcagcctggcagggggagggatgttcaccattgctgaggcttgagcaggtaaacaaagcagccaggaagcctgaactgggcggagcccaccacagctcagcaaggcctgctgcctctatagattccacctctgtggacagggcatagctgaacaaaaggcagcagaaacttctacagacttaaacatccccgtctgacagctctgaagagagcagtggttctcccagcacagcatttgagctctgagaacagactgcctccttaagtgggtccctgatcccagtgtacccaaactgggagacacctcccagtaagggctgacagacacttcatacaggtgggtgcccctctgggatgaagcttccagaggaaggatcagacagcaacatttgctgttctgcaatattagctgttctgtagcctcctctggtgatacccaggcaaacagggtctgaagtggacctccagcaaactccaacagacctgcagctgagggatctgactgttagaaggaaaactaacaaacagaaaggaatagcatcaacatcaacaaaaaggacatccaaccaaaaccccatctgtaggtcaccaacatcaagaccaaaggtagataaaaccacaaagatggggagaaaccagagcagaaaagctgaaaactctaaaaaccagagcacctcttctcctccaaaggatcgcagctcctcacctgtaatggaacaatgctggatggaggatgactttgacgaattgacagaagtaggcttcagaaggtcagtaataacaaacttctctgagctaaaggagcatgttctaacccattgcaaggaaggtaaaaaccttgaaaaaaggttagatgaatggctaactagactaaacagtgtagagaagaccttaaatgatgtgatggagctgaacaccatggcccaagaacttcatgatgcatacacaagcttcaatagctgatttgatcaagtggaagaaaggatatcagtgattgaatatcaaattaatgaaataaagcaagaagacaagattagagaaaaataagtaaaaagaaatgaacaaagcctccaagaaatatgggattatgtgaaaagaccaaatctacatttgattggtgtacctgaaagtgacaaggagaatggaaacaagtgtgaaaacactcttcaggatattatccaggagaacttcctcaacctagcaaggtaggacaacattcaaattcaggaaatacagagaacaccacaaagatacgccttgagaagagcaaccccaagacacacaattatcagattcaccaaggttgaaatgaaggaaaaagtgttaagggcagccagaaagaaaggtcgggttacccacaaagggaagcccattagactaacagtggatctcttggcagaaaccctacaacccagaagatagtgggggccaatattcaatattcttaaagaaaacaattttcaacccagaatttcatatccatccaaactaagcttcataagtgtgggagaaacaaaattctttacagacaagcaaatgctgagagattttgtcaccaccaggcctgccctacaagacctcctgaaggaagcaataaacagggaaaggaacaactggtaccagccactgcaaaaacatgccaaattgtaaagaccatcgatgctatgaagaaactgcatcaattaaggggcaaaataaccagataacatcataatgacaggatcaaattcacacataacaatattaaccttaaatgtaaatgggctaaatgccccaattaaaagacatagactggtaaattggataaagagtcaaaatccatcagtgtgctgtattcaggagacccatctcacctgcagagacacacataggcttaaaataaagggatggaggaagacctaccaagcaaatagaaagcaaaaaaagcatgggttgtaatcctagtctctgataaaataggctttaaaccaacaaagatcgaaagagacaaagaaggccattaaataatggtaaagagatcaattcaacaagaagtgctaactatcctaaagatatatgcacccaatacaggagcaccaagattcttaaagcaagtccttagagacctgcaaagagacttagattcccccacagtaataatgggagactttaacaccccactgtcaacattagacagatcaacaagacagaagattaacaaggatatccaggacttgaactcagctctgcaccaagtggacctaatagacatctacagaactctccacctgaaatcaacagaatatacattcttctcagcaccacatcacacttattccaaaattgaccacatagttgcaagtaaagcactcctcagcaaatgtaaaagaacagaaatcataacaaactgtctctcagattacagtgcaatcaaatgagaactcaggattaagaaactcactcaaaatcactcaactacatggaaactgaacaacctgctcctgaatgacgactactgggtaaataacaaaatgaaggcagaaataaatatgttctttgaaaccaatgagaacaaagacacaatgtaccagattctctggaacacatttaaagcagtgtgtagagggaaatttatagcactaaatgcccacaagagaaagcaggaaaggtctaaaattgacaacctaacatcacaattaaaataactagagaagcaagagcaaacaaattcaaaagctagcagaaggcaagaaataactaagatgagagcagaactgaaggaaatagagacacaaaaaacccttcaaaacatcagtgaatccaggagctagttttttgaaaagaccaaacaaaattgataaaacgctagcaagactaataagaagaaaagagagaagaatcaaatagacgcaataaaaaatgataaaggggatatcaccaccgatcccacagaaatacaaaataccatcagagaatactataaacacctctatgcaaataaactagaaaatctagaagaaatggataaattcctggacacaaacaccctcccaagactaaaccaggaagaagttgaatctctgaatagatcaataacaggctctgaaattgaggcaacaattaatagcctaccaaccaagaaaaagtctaggaccagatggattcacagccgaaatctaccagggtacaaagaggagctggtaccattctttctgaaactattccaatcaagagtaaaagaagaaatcttccctaactcattttaggaggccagcatcatcctgatcccaaaacatggcagagacacaacaaaaaaagagagttttagaccaatatccctcatgaacatcgatgcaaaaatcctcaataaaatactggcaaaccgaatccagcagcacatcaaaaagcttatccaccatgatcaagtgggcttcatcgctgggatgcatgactggttcaacatacgcaaatcaataaacgtaatccatcacataaacagaaccaacgacaaaaaccacgattatttcaatagatgcagaaaaggcctttgacaaaaatcaacagccttcgacaaaattcaacagcccttcatgctaaaaactctcaaaaaagtaaatactgatggaacatatctcaaaatattaagagctatttatgacaaacccacagcaaatatcatactgaatgggcaaaaactggaagcatttcctttgaaaaccagcataagacaaggatgccctctctcaccattcctattcaacacagtattggaagttgtggccagggcaatcaggcaagagaaagaaagggtattcaattaggaaaagaggaagtcaaattgtccctgtttgcagatgcacgattgcatatttagaaaaccccatcgtctcagcccaaaatctccttaagctgataagcaacttcagtaaaatctcaagatacaaaatcagtgcgcaaaaatcacaggcattcttatacatcaataacagacaaacacagagccaaatcatgagtgaactcccattcacaattgcttcaaagagaataaaatacctgggaatccagcttgcaagggatgtgaaggacctcttcaagaagaactacaaatcactgctcaatgaaataaaagaggacacaaacaaatggaggaacattccatatttgtggataggaagaatcaatatcgtgaaaatggccatactgcccaaggtcatttatagattcaatgccatccccatcaagctaccaatgactttcttcacagaattggaaaaaactactttaaagttcacagggaaccaaaaaagagcccgcatagccaagataatcgtaagccaaaagaacaaagctggaggcatcacgctacctgacttcaaactatactacaaggctatagtaacaaaaacagcatggtactggtaccaaaacagatatatagaccaatggaacagaacagagcccacagaaataacaccacacatctacaatctatgatctttgacaaatcttacaaaaagtataaatgggtaaaggattctctatttaataaatggtgctgggaaaactggctagccacatgtagaaagctgaaactggatcccttccttacaacttatagaaaaattaattcaagatggattgaagacttaaattttggacctaaaaccataaaaaccctagaagaaaacttaggcaataccattcaggacataggcttgggcaaagacttcatgactaaaacaccaaaagcaatggcaacaaaagccaaaattgacaaatgggatctaattaaactaaagagcttctgcacagaaaaagaaactaccatcagagtgaagaggcaacctatggaatgggagaaaatttttgcaatctacccatctgacaaatggctaatatccagaatttacaaagagaacttaaacaaatttacaagaaaaagtcaaacaaccccatcaaaaagtgggcaaaggatatgaacagacacttctcaaaagaagacatttatacagccaacagacacatgaaaaaatgctcatcatcactggtcatcagacaaatgcaaatcaaaaccaaaatgagataccatctcataccaattagaatggtgatcattgaaaggtcaggaaacaacagatgctggagaggatgtggagaaataggaacacttttacattgttggtgggagtttaaattagttcaaccattgtgaaagacagtgtggtgattcctcaaggataaagaactagaaataccatttgacccagccatcctattactgggtatatacccaaaggattataaattatgctactatgaagacacatgcacatgtatgtttattgtggcactattcacaatagcaaaaacttggaactaacccaaatgtccatcaatgatagactggattaataaaatgtggcacatatacaccatggaatactatgcagccataaaaaaggatgagttcacatcctttgtagggacgtggatgaagctggaaaccatctttctcagcaaattatcacaaggacagaaaatcaaacaccgcctgttctcactcataggtgggaattaaacaatgacaacacttggacacagggaagagaacatcacacagcggggcctgtcaggtggtggggggctggtggagggatagcattaggagaaatacctaatgtaaatgacgagttgatgtgtgcagcaaaccactgtggcacatgcatacatatgtaacaaacctgcacattgtgtacatgtaccctagaacttaaagtataataataataaaaaaaatcctaaacaaaaataaaaagtgattcgggtcctgtctctgacacttgttaagcacatgcttagttgtgcataatcaaatagatcctccgaaccttatttgattcatgattaccacagagcaatatttggtctacttgactcagagagttattacatagctcaaacaagaccaaaacagtgatatgcaaactgcaaagcagttgagattgttaattttatgcatcagcttgactgagccatagggtgaccagattgaacattatttctggatgtgtctgtgagagtgtttctgaatgagatgagatttgaacagtgtgaaaggaaaataaatcttggggcccccaaatcactaagctaaagggaaaagtcaagctgggaactgcttagggcaagcatacctctctttctattcaaagtcatccctctgctcactgagataaatgcatatctgattgcctcctttggaaaggctcatcagaaactcaaacaaatgcaataatttgtctcttatctacctatgacctggaagacccttccccttcaagttgtcctacctttgcttcgagttatcctgcctttccagaccaaaccagtgttcatcttatatatgttgattaatgtctcatgtctccccacaatgtataaaaccaagctgtgcttcgaccaccttgggcacatgtcattaggacctcctgaggctgtgtcatggctgtgtgtccttaatttcggcaaaataaacttcctaagacctgtcttagattttggggtttacaataggtatacccagtaaagtaaatggctcttcccaatttgagtggggttcatccaattcactgaaggcctgagtggaacaaaaggtaaagaaatacatctccttttattttctacttcactgcttgagctgggaaatttcttctcatcttctcctgccctctgctcccctggttctctggcctgaagacttagattaaattacaccattggcatcctagactctctagcttgcagatagcagattgtggaacttcttagcctacataatcatgtgagccagtttctcattttatgtatgattatataaatgatgatgtatgatatgtatatattatattctctagagaatcctaatacagtggcccatgctatcaggcatcataaaccgaatgagagtaagaaaggccataagtatttgtaaattttacaggataattatcacactgtaaacactgtaccctggttctctttttggatattaaaaataaatcaggaaaatatataaaataacactgaaaatgttcaagactgtttaaggtagttccattctcttaaactcatctttgaaacaagactctaataaatgtttcctatggtgagtttcttgtcttgacttttaactatgtcatcagctcatgatgcagttgtaaccacacagtgaaatagtgttcttggcaatcaaattggtcctgaggtcaaacatttcttggagagtattatgaagaaataagatgaatgaatcaattctattgtgcatttattgcaattcatataagatgaagaaatataatgtagaaaattggtcactgaattaccagccactaacatggtattataaaggaaatgagatttaaatctgagaaggggattgtgtgcaagaacaagaatttgcaaatagttgacattagatccatctactcattcattcattcataaattcattcaaaaataggtactgagctctactgtgcgtgtaactcctgtctcaaaatttaaactgttgtttcagaatttagaattaagagatatctaatctcttactgattgatagacatgaccttgtacttatttgattctggtagaaaatgctaataaaaataatcaagaattattaggaatcattgactatccttatttgaacaacaaaaataattttgataaattatccattatattctatttgtgaatgtattagaaaattaaaatcatttaataataaattttgtttgtatcttacctaattccaaaccaacagcgacaaaaaacaagaatataaagaggcttgcttatctattgaagtaaaagtaattcagaactcttaaaaagaatgttgattttggtctttagtttcttgaagtcttctttttgaagaagtgacatgctgtggggaaaacctcttttatatttaattgtcttttttgtccaggaagtattcctagccagtgtgtcattatcttttaaaagtatgagaatacaatgaaaattaatgggtttctttaaactaacaatgaaccttcttcatgtaccttatcatattcttcaaacagcctctaatggaaaaagaagattgtgtttctaaaaattccccacagtgcaccaccacttcttttatatgttaaaaaaattcaaattaatgttattcataaaaacgtaggtgaaacagcctaaaaatagacccaactttttacattgaaattatcagtccttgcctaaacggtcatgtttagacaacaggacaattattttcaaattctctcaagtaagaggccaggtgtcaatattccccagaattatttgcaagtttcaagtccacaaatccatttaattttgctttaaatcagcatccgctgctacaccctggcaacccagaggtgtaaactggctcaaatatgtgtttttcttgttctgaacatttatcatcattatcgtcatcatcatcatcatcatcatttaatttaaatgctttaagcagtcctctattttccagtttcttattctgaaattactcattactgacttattcttagataatctagacatgtagaaggtactcaagcttagggttaaagacaagcactggagtcagttgtcttggttggtgaccttaccttataacttgttagctgattgactcattttttgattcttcagattctccatctataaaatgatgataataacagtccctatttcatcataatgaaatcataatgattacatgcaatactacctgcaattacctcaggaaatggcacttagaaaatcctcaagaaatgttagtcattgttcttatctgccccctgacaatatttgtatcagcaatctctgctacagtggactttgctaaaagaaagacattatctagcacacagttaatactaaaaaaaaaattactcttattagtgtctggcttctaaaaggatttgttgacttgcaaatcctgctaaagtttactttgtttagataactaggtacaattaggaacaagtggttctctagctgtgcctagagaactagttacaatttttaagctgtctggaatcttaaatcctaaagtctctcagattgttttttttttcattctcctttttttttcccatagcaactaaatcaattccaagaatcacaaagagaaaaaagaatgacaaaccgagggttgtaatcctagaaaatttataaagtaacataacagcatacagcatacatattctacgttgcacttatcataaccctaaagagttcatatttgtaactaaaattagcaggaatttatactgtccttcaggagtaaaggcagctgtgagctccaaattcttccttctcttttcaaaactcctctataacccgtcacaccgtcagagaataaactcacttagcaaaaccccaaagaagtgcctgcctaaccacttgcaaattagatacctgctggggtaagcaagacagtacccatgcaagaatgaagaggagaggggagaaggctgggatatgctctgataaaatgcacaattcgaggaaatagtctaactgcacactcagctcctgttgtctagggaagacaaagaaatatgtaaaattcaagctgacatactatgaacagtttcataatgaagctatatcacttattagaaaattatgcagatgaaccctgtattatggcagagggagccgcagaatagccaagaagctggctccacatggagacagacctcatggtcacgaaagcagtgaaccttgtctcctgacccagaacttgccattctgccaactgctgttcataaaattgaaataataaggaagaaccactaaaaatcattaattttgcaaaactagtggtattagaaaaggtatgagctttggagtctaagacatgtgatttgaattatgtttcttccagttctagctaggtaatcttgggtagaatacattatatctgaacctcagttatagctggaaaacaagattatgaataccttcctcttggggttgagataaagattgaattaaaaaaactccccttcccaaagtaaaacacgttcagtctttgtcctcccctgcacaaatgaactcattgtctcaggagtacagccaggtagacagtcacatccttctgtggaagtgatacagacatcctcactgcatgtgaaatggaagaaatattcttgtatattgtttaactgaaggatgaaattaaagttagaaatgcagactaggtagcccttatcccgccgtttatatgcatccttcctgtctacagaacacaactcagggagcaaataggagaactacaatggagtgataagaaaaaattgtcattcttgcatctgttatttagccatatctccagctcacccattttattatagttaataacgatggtaatcattcactgagataaagtactaagtactttatacatggaatctcactgaattctcatagttgcttttggagatgagttctttctttatctcctttttgcaaatgagaaaacagagcctcagagaggtttagaaacttgtttaagatcatacagtagctactgaagttgaagtcatgatttgaatgcttgtctgattctacattctctcttcttgtccttgtgtttccatccctctggcctttgactgccacagccctgtggctctccttcattgaactacctagttaggtatacctctcaagatctagctgtgatcccttctcttggacatcacttcaggcttgtttctggctccaaatctctatgaatatagataagagatacactcaaaacctttacctagcctcacaggggtttatccttgtagcatagacatatcttcatgacaaagtgaaccaggagtgtttgaaggcctgctttgtaaccaactgcatcaacattagggaaatcaccaggtgctttcatcattttcttctgtaaaataaaaatttataatgtgcttacaaactacatagctctttgggaagtaggcaaattgaatttttcaaattctcagtggcaagctgggcagtaaaacataattactgatttttaatatgtactttgtggcccttgtaattcaaagatgatgattttgactatcatcactatcagtgtgaaacaacaggagctcaaagagaatccaaagcttgatatcattcctgccctcattttagtgttgaaataaaagttcttaaggatttgaagaacatacttaggagttctctccatagcattttcatagcactcaaggaagtataaggattagctacagtgatcccaaatgctaataacatgaattttccaaatcagaaagtaaatactcagggcatagaaagagctctcgagtaccactgtgagccccaagatatctgataaagcatgagtgtttgggttttggtggctggaaggatggaatggagctaagcttataggttaaaagttacttatctttattctaagaaaatgtgagcctcataagttatctctgccttgatgatccctcttttacaattctcattgttaacacttaatttctgtaacattagcttacaaggattgtttctcaagtggaatttctgcctccaaacataataggcttacaacaaccatattattttcttttttgaaaattcctaaattcatttacgcatttgctcttacacctatcaatgcatccaaaccatatatttattgagcagatatttattgaaagcctgttcagtgctaggtacagggagtttaaaactgaatggcatggtttctgccaagaggaatatattagaaatttatagaaggcagaatactattatataacatcatcagagctataacagtagtgcagataaattgttttgagaaaacaaatttgggcagaagaaattgtttcccatgcataggaaacaataaacatgtgttggatgaaaaaaagaacatgtaatccaccggttaaagatggaaggacctcagttaggatagtatctcatgataatttttttttctttttacaatatagcacttattttaatgatacgaattgatgaatgaataaataaatgacaagtcaatgcacctatattatggaacagtagatatcagaaaaagctaaaggaaatttcaagagccatataatcaaatagattataaggacacacaaaccaaattaactgtagtgaaagataacatgagacaagaacaatgagaaataaataacaaatatgggtgatttcatagtatgaagagtactatttgttagaggcaactatcttagaagaaaaagtacatgagttggacttcgatggttggggtcctttgcataaagtcagaaaaggacattgcaagtgaatataaagataggaaagcaagggaaagaagatgaggaattatggtattcgttcaatcttgcagaaatgcaggatggaatggaaaactggaaaagccaagtttatatcaaaggagaaaggagttttctcctaagggtttgaaatctatggtgggtaaaagggagatattaaagtatttggggataaagactaacatgattatctctaaaatccaaatatgcaattatgtgttaaatactaacttcattttccagattatattgaaatcatcaaaggccagtgcggtggttcatgcctgtaatcccagcactttgggaggccgaggtgggcggatcacttgaggtcaagagttcaagaccagcctggtcaatatgatggaaccccatctttactaaaaatacaaagattagctgggcatggtggtgtgcacctgtaatcccagctactctggaggctgagacatgagaatcccttgaacctgaagggtgcagtgagccaagatcacaccactgcactccagcctggataacagagtgagactgtctcaaaaaataaataaataaataaataaataaataaataaataaataaataaaaaataaagaaagaaaagaaaaagaaaaaaaaatacttcaaatctttcctgtacctaaaacagttgtatttttccatcatatttacatgtgatttatttgaagccatctgcagtttgtttcttattctattttgttttctcacccaatagctatttattctgttcccgttgttgttattaaccttggcagcaaaaatttatctacaacaccttcagaatagaaaatatacagattagcaataatttgaagcctgagatcaggatgatatgtttttgtccattaaggaaatgttcatattccagttttaagcagctcatatctgtctaccaaactcaagaatacttacattctgaaatatctgaaattacaagtgttaattttttatgcagattgttctgctattctgttttctcatgcttaccactcaggctgagctcaaactatgaataagtgattaactggtgtgaactatgtggccatggtgatgttcagaatggtatgcttgatgatcctatcatagatagtgttttgatataagcattagatttaaggcttaggaattgcacttttcacacatatgtttaaacgtagtgacaatttctcctaatgttaaaatgcattctctgataaataaggcttgaacgctaccggtgaatatgtggagctcagtcagctatctcagctgctgcaaagatatagctattacatggttggtttgacagacaaggagctatcctctttaaaaaaataaaaaaaacatactccagcctacaacccgcagaggatgctgcatgcaacgcagtgattatgaatcctaccaaattttcagccatgccagcaattgcctcttcctcatatggaaatctttgcagccctgtcttcagaagaaaaacaaaggcagaggaaaaacaaaaaggaaattcctgtggtaagagagctcaagattcttgctctggcacttaaaagaacaaagccagtaattgccagagtagaacagacagagcactaacgatgggactgcaaaaagtacttgggctagctagctcaagaaggtgaaagacaggttacacatgctagcccttgagctaggagaaacagctattatcctaaagctgaggagaacccaatttagctgtaagactagggatgagggaaaaaaacacaacaacaataaatcctatctctatagtacctggtctttacccagttagaaagcagtagaatgaggaacagagagaaatagagaaacagagacagggagagagaaacaaagagagagagaggggagggagggagagaggtagttccagtttattatgtcaattatgcactaaaaatggggttgtcatggtctaaatgtatttcctaaaacttatatgttgaagtttaatcaccaatgtgttagtattaagagctgaggcatttaggaggtgattaactcatgaggacagagcctcatgagatcagggtctttaaaaaggcttgagggagtgattggctctcttctgccctcctgccatgtgaggacacagcgtttcccttctgatgcagcactcaaggtgccattttaaaagtggagagaacagcccttatcagacactgaatctgctggcatcttattcttggactcccagcatctagaactgtgagaacatagcttcctattgtttacaaattacccagtctcaggttttttttgttgtagcagcatgaatagactaagacaaaatcttactttaccttttgaccaaattaacatgcatggactgggaaagtagatacataacctgttttcttgtatctgatttgtcttacttctacctttttgcacccacttgattcttttctatcttgttgtatgctgcttcctttatttgcctatcttagtgttattttcttcattagggtctgagccaagcactgtcctgtatgctggagactctacctaactggacatacttattgcctttcaagagcttgaaaggaagatcaaaaccaaggctgggtcaggatatttattcttagcaagtcatacattttatattgagaagaattttataatttgaagtatgttcatcattccagtggaattttgataagaatttcacccaacccatgcaactgtgtcaaacagaaaaatcctgatggaaaatcatggctccatgggggagtttgctctggtggaaatacatctgtgtaggagttcctgttaaaagaagacacatcactacattttacctgtcagggattttttttaagtctacatatgcaaaggcaaagttgtcactagcgtgtaaacacagaatctctgggaaggatttgcaatatgacatctttccatgtctgctgtatttgattcgagatagcaaaaatgcaagtggttccccagagactacctatacaggcaggtttggagctagtgtttgtatcttgcagggattgtgaaataaagcgtacccatgtttaactctcaacacctcttgccaggctgagacaaaatggtgaaacaaggtggtcagcctggagttgtgaaaagagggtgggatttggattcagcaagatgtgagtttgaattccagctctatcacttttagttggggagtctctacaatacactttgattagggtagtgatacctactgagttgcagtgattaatggaaacactgcataaaataatcttattagaatgactagaatttaagaagctgttacacacacacacacacacacaataaatatgacgttagtttgacaatactgactacactacacataaaaataaagttcaaatctgtggtttaaggttattcttatgacattaagaccatttgtgatttagaaaatcgtatctaatacacgtgcttatgtaagggagacatacactccccccaaaatagctaaaatgtatggaacacataatatgtgccaggtcctgttcaaaaaaatttacatgcatgattctcaaccatttatactaaatccaattattagtccaatattatcttcactctgcagctttggtaactaaggcccagtaaggttgggtaatttgcccaaggttacacaaatactaagtgatgtagccaaatagatgtaggcagtctggttctagagcctgtgaagttacttatcgtaccatactacctagattttccctaaaaagtcaacaattattcttagagcagaggggagcctcatatagtatcaatttaattaagaaatatcaccctttccttgaggagttttaagttgaataaaaaataatggatataattctagttactgtgtggttaattgctaacacattgcagcacaacctatgtatgttctggattatacaggtgaaagaataacagggcaaaatttggaatggccaagaacagtcttcattcatctgtccttctatccatccataaatccattcatccactaatccatccatccattcatttgtcaatccatccatccatccatctacctatcctttctgattgcagtaaagggatgcagagcaaaatcttacagttaggtagacctaaattctagctcctgttttatcacttactagctgaatggtcttgagaaattaaggtaacctgattgagtctcctaaaatggaaaaataattaaaatatacttaatggtagtgttatgagaattacgtttatagacttctaggcacagtatctggtacaaaattaacactaaataaatgatggttatcaatattaacattaaagcttttatgtcaggtaccaaattacagttatgttctgaagatataaagattaataagatatatttcttgccctctaaaagattccagaagtttagtagggactttacacaagtgtgataaatgtggaatggttagttctaccatcgtttagggataagggaatcaagaatactaatagtagttggctgggcatggtggctcactcctgtaatcccagcattctggggggccaaagtgggagggtctcaggaacccaggaggttgagactgcagtgagccatgattgtacctttacactccagcctgggtgccagagtgagaccctgtctctaaaaatttttttaaaagaagaatgtaatttgttgagattttctgatgttcagatgctgagctaagtagttgtagcacttacttactatctcatttaattccaatgagaactattattacctctattttacaaaagaggaaagtgaggcttaaagaaatgcagtttgttgtttggagtcatgcatttaagaaagggaagggccgagaccttaacccaaataattttttttttttttttttttttagacggagtcttgctcagtcacccaggctggagttcagtggcaccatctctgctcactgcaagctctgtctctgcctcccgggttcacaccattctcctgcctcagcctcccgagtagctgggactacaggcacctgccaccatgcctggctaattttttgtatttttattagagacggggtttcaccgtgttagccaggatggtctcgacctcctgacctcgtgatcctcccacctcggcctcccgaagtgctgggattacaggcttgagccactgcacccggccaacccaagttattcttaatgtggaaaaactaagaagactgcctctaagctacattttaaaagattaccacccatttttaagtagatagatattgaggtgtattaaagacacaggaagcagtaaggaaagtgacaaaaataaatcaaactatgtggcccagttagaaaatatgaggtgattcagtgttcattcaaaaattgtttattgagggtccattacatgtcagggatctttcctaggtactgaaggtgcatggctgtaaaacatagactaaaattcctgccaacgtggaccttattatccattctctgggagggagacacccaaagtaaaattaaaaacacatgattaagaagttcattataaagtaatatatacaacatataataaagtataaaaacctatgttctaagtgctattgagaaaaaaaaagaagcagagaagacatcaaagtaggttgaaagtagggagattttctggttttaaatggatagtcagggaaggcttagccaagaagatgatatgcggacatataagctctgaagcgctgagagtgagccatttgggatatctagcagaaaagcttgccaggtacaggaggtagcatttgcaaagacccaggaaggaaaaatgactggcatgttggaggaacagacaggaggtcatggattgaaatatatatatatatatatatatatatatatatatatatatatatatatatacacacacacacacacacacacacacacacacgtgtgtgtgtgtgtgtgtgtattagcagaacatagaaaaagaaactagcaatgcaagagaggaaaaggagaattctagagccaaatctttgagcagtggaaggggtagggatctagctcacaaatatggttgatgtatgaaacttgtgcatgtctggtgggggtaggggtgaaggtgggagtgtttgaggtcaaatagggcaattcagccagagattaaattagaggtgtataggaaccaaatcttgaaggctcttccattacaggcatagatgtttggactttgtgctagtaaaaatgaggatctttaagggttttaggtacaggaatgaaatattccaataagtttcaccaggaaagtgaaacttctgctgagctttgaggcatttatgggatttgaatacatgagaggtaaaagaaagaacaatgtaggcaagaaggtcaacagtaataatgacccagaattggaatagttttggcagatggggaaccagttgaagatgtgtgctggcagacacctctgggggaaagaaaggaaaatatgagttatatctaaaaggctctggaatcaatctgcttaccaggtgcacactctatcacatactatctctgtgagcttgagcatgatccctaatttcttgctatctaatcacttgatataataaagataataatagtaatttcctcataaagaaaatgaaattaaatcatatggataaaatattacctgtatgcctgacacacattgttctcactaaatgttagttgttattctatatagcatcttgggaacctggagaggatgtaagagattggttccagatgtatggaatgtactagaaagaaacatgattgaaagcactatgatttcaggaggctgattatattatgtaaatctaaatattgatctctaatattcaaattcatcattttaaaggtcaaggcttataacagaattcatctagactaaccctggagataatataagaatcaaaatagctcttaaagttcaacagttaagcagttgagctgtggaaataggatatttatgagtagcttacacacacacacacacaaacacatatatattgtaaataaacacaatggggatctccatactgctaccaaattttcatattttataagccacaatgtgctagaaacaaaatttggtgcttcagaagaatgtttgattaatgatcatttctttgtaattagttatttgaatggacagcaacatcaacatatggaagaattcagaaaaaaagaacacagcatcgtacttcaggagtctttacattttctagaaggccaaattataaatagagtcttatctcacctatcatgagagcagattgctacttatgtatccatttataatttatctgaaaattccattttttaaagtttctgtatattcaatgtatcaaactggatagagagttcttttttcaagttttccagtttggtgaatagatagatagatagatagatagatagatagatagatagttagatagacagacagacagatacagatatagatatagatgtgtatatatatgtgtgtatgtgtgtgtatacaacatattgcttttccttgttaaatagcttgttaaattcagttctgtttcatgcgttaaagattacagcaggtaggtttctaaaaagtcatcatagattctacactgtttgggaatacatagctaatatctgcaactaaggtgaacgtgagaaaaatcacttatttggttttgcaactacagatctaactctcaagcattaagatatttcgtcaaattgatgttgaaaggtatctagcaaattcatgaaatctcatcctttaatccaaaattactacaaggaatatgaactaaaaaagccaaaagaggctatcacataataattagatactagatcaggcagtttttgtgttcagttctcaaaatactgaatatctcaaaatagtgaggagtgaatacaagagtgttaatcaagttcacaagtaaaattttattcccaatttgacaggtaggtgggtaaatatgaaacttagctgtgcctcatatggttgtgttgataggatttaatttaagtgactggatgcctactagattattgggcagaaaatataatttaaacataatttggccattaattagtcttaatggattggataaaatggctcagtgaacagattaaaaaaaattttctaatggtaaataatcctgtaagaatatctttagcctgagcaacacagcaagaccttgtctctacaaaaaatgtaaaaaattatctggctgtggtggtgtgcacttgtagtcctagctacttgggaggctgaggcaggagaatcacttgagcctgggagttgagggttgcagtgagttatcatcatgccacttcatgccagcctgggtaatacataatctgtctcaacaaaagaatatccttaaaatacaaagataaaatataaaaaaaattttagtgagattttagaaagtagagagatagagtagacaatttaatacaactttcaactaaaaaggtctgagagacttacagaagtttgtgttgtagaaatctagtgtttggttttctcagcagatattttcttttcttttggtaatagcagttggggtttcctttgggaaccgattccatttcatattgtcatgttatttgatatcaataagaagagccaaaaaatttaaggccaaactacaaaggttcatggccaggttctggcccagtgtaatgatcaacaagtcatataatcttcataaaggttgggtttctcattttcattttatcttgtttatttatttatttatttattttgtgatggagtttcactcttgttgctcatgctggagtgcaatggcatgatttctgttcactgcaacctctgcctcccaggttcaagcaattctcatgcctcagcctcccgagtaactgggattacaggtgctcctccatacccagcaaattttttgtatttttagtagagatggggtttcaccatattggccaggctggtctcaaactcctggcctcaagtgattcacccacctcggcctcccaaggtattgggattacaggtgtgagccaccacacccagcctagggtttctcatttttagaatagaagcaacattagcactatgttagtaaaatgccaccacaaatactttgcagaattactgtaacaattgcaatagagaaaggattgctacatcgatattaagaacacctagggggtgcttgctagtgtaaaccaacatgactaaccacaataggtgagtgtattagttcattttcaccctgctgataaagacatacccaagactggctaatttacaaggaaaaagaggtgtaaaggactcacagttccatgtggctggggaggcctcacaaacatggcggaaggtgaaaggcaaaaggcacaacttacatggcagcaggcaagagagagaatgagagccaagaaaaaggggtttccccttataaaaccatcagatctagtgagacatattcactaccatgagaacagtatgcgggaaaccatacccatgattcagttatcttccaccaggtccctcccacaatacatgggaattatgggagctacaattcaagagatttgggtggggacatagctaaatcatatcagtgagcttcattacaagttttaaaaaatgaaggcaacaacaggtgaactgtatggtatgggcatgataacttaatagagtgttttaaaatatgatggcagtttattttcatcaatggttggtcttttcattatcaacatgagaataacaaatgtatcttatataaaatgaaggatcaggttgatgtctacttgacattccccatgaactacactggtattagggagacattagatactcccagatatactggctttggcttcctgggaatggagtgtagcttggtgacagctgggcagagagcctcaggcatgctccccattcctgtgcagagggcacagccatggaaagcatttcttggacttatttataccatcagtaccctaatgacagaagaaatacagcttatttcatattcatttttaaaagtaaccttaaacatcaggaacacaaaagaagtggtagagaattcggaggtaataggggaacaaaaagcatttagtgtgataatttagagggtgtgtgcaaacttcatgcagatttaaatttcccaacagcttgcaaataggttactcaagtattcaaaagcagaaatttctagaggtgcattagtcgtaaaggccatggaatgtagccttttatgtttattgttttcatttacattctgtccaaccctgagtcttgtagtctaaaagggtgtgacatgtgtgttcaattgcatccaagaatgtcttctgaaactgagtccctccactgtagaataaaaacagcctgggttcaaatagcagactcacttcccagtaaagctggcccattgacttgggccatttacttgtattttctgagcctcagtttcttcatctgtaaactgaggggctaataatgtacttacactatagtggtaaagataacatgggaaaatatatgtcaaatgcataggtccaggggtatagtgcatttgattaagagcacaacaaataattacaattatcattgttaccctttttgtgaatttttttctttttttttttttgagacagagtctcgctctgtcacccaggctggagtgcagtggtgcgatctctgctcactgcaagctccgcctcccaggttcaccctgttgtcttgcctcagcctcccgagtagctgggactacaggcgcctgccaccacgcccagctaattttttttgtatttttagtagaggcggggtttcaccgtgttaccaggatggtcttgatctcctgacctcgtgattggcccgcctcagcctcccaaagtgctgggattacaggcgtgagccaccgtgcctggcctggccattgttaccctttttgatacagttgtgaggagtgaaaaatactcacgttcaaaaaggtacctttcaaggcagagtctccctcctaagagataaggaatttcagaaacacaccaggaatcaaggtggatagagagtttctcacctcctgaaaattacagtctaaacttttgacttcttttaccccagagtatcttaagtttgggaggaaatgtttgtgttttctctaaaagaaaagcacagaaatatcttctgcctaaattattattatacaacttgttttttcttcttttgaaacctctgtggcagataaaacttgtatgttaaaaaggaatttaaaaagataacacttgcaaaattttgtgaaacctaatataatcttctccaaagtgtaacgcattagttttccttaaagtagaaatggtttccatttactcccttcaagataaaactaagaatcttaggatggtatgcaagttcttccatgatctggatccgagatttggatgctagcatgatgccataaagcattgccagccccgtaagcctatttgtagtttcttaaacatagccagatctttcagtaatccatgttttttcatttacagtattcttccttctgaacattcattcttccccagtcattcaagttagctagttactgcctatccttcaaaattcatcacaagtatatgctttttaaggaggtgtgttctaaatgtctccatctcccacatctgttaaattactggctcttaatctgtttaaagcatcccttcagacctgtatcatgaagtttattatcagtgttacgtttgcctttttgctggtctccacaactcatttgttcatgacttgagaataacgggtcttcatatcccaagaccaggcacacaggggactcagtaattggtcctgtttagacttgcggattgcacccaatacaaaaccatgataagcaatgttaaatgccacagcagtgccagagaatcagttaataaatgcatatgacagattattatatccatagcagaagaggttattttaagaactactgcttgttttgtgtctgagtaaagatggaatatcaaacataatttctttacgatcaaacgaagcttatttccagataggaaggcattttttttccttttttctttattttcagtaaggaattaaattagaaaaatcatttgcatttttacatttgtcttctctgaatatgcagggctggttgaattctgtctgacaccttcacagaactcgcttaagtaagctttccattactaaataaattgcatccattctaattaaagatatgtagagcatactactcggacaggagaagcaaagtgctatgaagagctagagcttccatggtaaccctgctagggataatataattgattcaaatggtctctcctgccacatactgattccatgccaacaagccttgaaaactgtccatcatttcacagagctagttatagaccaagtccagctaagacaaataaatggtgatagaacttccagagacaattactacaatgaatcatgaaagacactccttgctttctagctcatttagtgattgattaccatcaacaaggtttaaataattatgtagtgaatatatgagtaatttacagaaagaaagggaaatacgtgtatcaattctttttgtataggggatctgctgtgggagaaataactcaaaactcaaatggtataggcaccacattaggcttaatattggtacatcattctgcctcattgctggttgtttgcgtccaagcttgtcaggcaatgtgtgagaatattatgcacacataataggaagtgataaagccccatgaaaatgaagattcagaaagtgagaaaagcacagtactttttcattccccttacaacatattatagttcctctggtcctaaccagagtgagatagagaaatgagttgatttctgtaaaccaaacttctcaactctagtagctcatattcctgacattcgctttggttgctgaatttgtcagcagcactcgaggttgatcaggtggtgtttcactggaagattggtatttgtgcgtagtggtggtggtggcgggtacttgctatttaggatgccatttgcactaaaccaatttcatcaatatcctggttagactaacttgttcattcacttcactccaggtatttcccacactttaaatttgctcccgcattgctatctaggttacacttaatagcctgctgatttagaagccagtctctcagtcaatcatcaagttatcaggcaattcgtttagattaaacctagtggaatactcacattgagctctttcagcttatatttgcttttgaaaatcttgagatttcaagctttcatatatttcactgcctctttaacaaaatgttagcactatcttttaatatacttttttcaatatgtattggtacctaaagccataataaattcctttaataaaaatgcgccaatagattcattttcttcttttttgctgcacaatattatctcatagtgtcagtgatggaaatctgctctctatttttagagggtgggatgaagtaaagaaggcttataagttggctctaaattctagaagctgaaatccaaggatcattccaaaagtcggcaggtgatttcctatctttgttcttgttttgctctgaaagaattcctctcttaaatactaacctgttgaactactaccatacatttaaatactacctaaaactttctaccttttcccttccaattgcatttgatcatgccatgttctcaaccttcacagaattttaaaacagtttccagctatcccttaacacaagggatatttatgtgtgcatttatatattcaagtgatcatagaaatttagtcttttataaatctctatatacttttctatttttgtttaaattaaaatatagaaaggaaatagagcaagacacctttatacatactacgtagctatctacatatttattaacaatctttcaaattaaaaaaacacagggttgaaatcatatattcttttcttcttcagaccaagtccctccttcttcctattctgtccaacaggttaaaaacaatcgttaattcattatgcattatccttacaatccatttttgaaatagacacatattatctatgcatgagcaatatatcatactgtgagatttttttcttaatttacataaattctactctagtgtattattatgttacatcttatttttggtgttctacattaattttgagatttctgttatttcatattaacctagttaattgctttaacctgctgaatagtatctccttgtatgaatctttcactattttgaatactgttagctctaccttcaaaatatattcaaaatccaactacttctcaccacttccaggctaccactctgaattatcctgtcttgtttggattattgaacagtcttctaccgttctgcatgcttcctcttcagagaccttaaatctattctcaaaacagtcagagtgactcttttaaaaggtatgtcatattatgccactaacctatttgaaatcctcacgtggctttgcctctctttcactcaacacttccaacaatgctgcatttaagttttactactaggtgggagagtttctctaagatgaatgcctgtaaatgaaattctctctctttcatattattttcccaagtgattatagaaagatttatagtcacagcagtgacatataaactgttcttttaaagccttcatagaaccctagcacatagctttgtagacaatagatggcaaataattatttaaatccttcatccttcaagaaacagttcctgtattagccacccgccataactgtttttctatatctctttcagaaagattcatgcttggccttcctgtatagaaattttgtaagtgctttcatttttgcatcttcatgcttcttattgtaattatgtatgtctgctccccacctgcccacccccatcacccacttccccaccatattagtgctcgttctctggaactgggtcttcattgcaccctagtatctaagaagaaaatgagtatattcaaattggagatgatctactaccaagaacagaggaattttcttacatatgtaatccccttttcatatcaccatagttgctattggtgattgacagatattgctatttttttccattttatagatgacaaaattgagggctattattttcccattgataaagaagtaggaaaaggcagaatgtacattgtaaaaacgctacactaaaacctaagcatattttactcttgtctgggacatagaaagtgctttgtatacccttttactaaaaaacttcctaagataatactatgtaaatattgccatatttgattagccaatgtaagattttatttactttgatcatattcttaagtaaaaacagcctcaacaactggaaaaaaatacaattttcctgtcttttacccataggttgtgagtgtgtctctctgtgtgtggcagggtgggggtctgggggatgatgagggagagggagggagagggagagggggagagagagagagagagggagagagagagggagagagagagatcctatattgtgcttctagttttaaggtcaagtatagatcactcttaatttgagggatttttgacagttattgatggtttgactttcaagaataaatcaatgaaatgctgagaaacaaaaagcaccttaaagcttacttcgacaaagtggccatgaatgaagaaaatgagacattgttaatctgaagccataatcatatttttggctatagattaactacttactactcaccatattggacagacctactttgttcctatacaaccctcaaaactgattttcctccatgttccaatacctttccccactactcacagatacactatatttccattggtgacacacacacacacacacacgaattggcttgaaaaatagcccatttgttttcacaacaaagggagaggcacctgataagattgttgcaaggtatatgttctcagcacagcaccattagctctaggatgcaagccccagtgtgcttgcctctttgcttttttcatctgaagagtcaaagctcttgtttattgctactgaaaggcagctgtgggtgaaatcagcagtgtcattgtccaaagattctggcaatgggtttaagtaaacaactaagggatgttctgtgccttcgttaataactaaatgtcggtgtgagagaagggacgagatgtcatttcttccagttaccccactggctttattgaaaactcagttttgaacaatgattctctgccttttcactgtcacccaattaagcttgaagcttttattttaccttttcaagatctctatacctctccaggaggaacaggacacaatagagggttttcacagcattgcaggcagatagtagatttgtaatgattagcaatgacacattctattttgggactagatttatcattcatatgctttcattctccaggtagtatttttactcaacttttaaaaatacttggcattcttggctcattcatgtacatagaaaagatatgtagcattactcccacccaaatcctttcaagttatgttgaatgttgtcactgaaatcatgtgtcatgtgtaacagagctcaaccactgagctgacaattcctgcagatgagttaaagtttgaattcactatattgatttattcttagttttaaaagccaacttgggcttcatatcttgccaaagattacctatttataatcattataaccatgtcagtgggtgcaatggaattgggtcttctcagccattttggaattaccaaggaataaattaatgtttctacgactcccagctttattttctgtcaacagctattcattgaggaggagtaagtattaaattgtgagacgccctggagatacagcagtgagcgcaaagagacccagtaactcccacatatcaccaatggtctagcatggagtcatatattagtcaaacacatgcatatttaagtaaatcattgaaagtatcaacaggctgcaaaagagacaggagctacaggagcctaagaaaatggaacagcaaatgttgaggaaaggggaaacatttcaaaaagttatcctaagtaaatgttgtatgaccttgggatgtatgcaggatgtgggaatggatggacgaacagattttccaacagagataacagcacatgctgaaatatgtagtacttggaataagaacaggacagagaaaactctgccatggacagaggtcattgaaagagacagtatggcaggccatgagcccagtgaggtaaacaggaacattcaggacatcacaggccatgttaaagactatggcttttattctaagggcaatggaagatatagatgggctttaagcaggacagtgatctgaccaggtttatgttaaaagaagaatcactcatattaaaattgaggatagtcatatcttgcattgacaatatcaaaggagcagtataatgatccaagaggaccaataagttcaaagtaaaaagataaattccaagcatccagtagagttaataggtgcactctcagggtataattgtagctataagagtatctgcttcaatctattattcaaaaacatacatcaatgctcaaattttacaattcttcacttaaaatggagcaccaatagatgatcccaagatttagtaacatctacacctgcagtagcctttaaatctggttaataaagatgcctattgccacttaattgttttatctactgcacagcaagctgaacccatggctcaaatctgaattatccatgaaacaaaataccagaaactataaatgaagtattaccacacatcctttgatataaccattattaaaaccttaaagataaaatttattagcacatatttattgagtgcccacaatgttccagatactgtgtatacaacagtgattaccaccatttgaattgtgtctcccaaaattcatatgttgaagtcctaactgccagtacctcagaatatgactgcatttggagacagagcatttaaagaggtagttaagttaaaatgatgccattagggtgggctctaatccaatgtgacttgtgcctattgtcagaagaagaaatctggacacataaagaaacacctgggatgtacacacacagagaaaagatcaagactcagcaagaagtcggccatctgcaagccaaggagtgaggtacccaaagaaaccaaccctgctgacaccttgatcttggacatgcagcctccagaactgtgatcaataaatttctggtgtttatgccacacagtctgtgatagtttgttatggcagccctagaaaggaatacatttagcaagttataaatctttttttttttctaacagtttacgatctggtggggaacagagataaaggtgcaaaaagagagagaatagcttctttgataaggggaatataaggtgctatgggacacctacccttaatttcggggtcagaaaatgatcactggagaaatgtatctctatgttgaagtctatgtaggagtagcaagacaaaaaaaaaaaaaaaaaagagggtggaagagttttagaaaaagaatgcatgcaattactcatgcaaaaacccataagacaggatgacagtgtgaggatctggatactttgcatggaggggatcactaagtgagtatttgctgattttttaaatagatttatctattacattgtggttaaaataccttccgattttacctggatttatgcaaatgcctattcattggttttcctgcttccattctctgtccctactacgctgtatcaccacaacacccagagggttcattaaaaaatctgaattacatctagtcactgtccttaagtaggcttgggggcttcctacagcactaccaaataagcaaatacatagataaataagcaactaaatatattaataaataacctcttacctgcaaagtttgatatgatctagctcatgcctacctctcatacctactttaattctactctctgacccaccctacctcaccccatccccagccacatgggcttcttgcagggccacaagagcacgccgagctcagtcctacctcacagccttgtacttgttcttccctctatccagaatacactttcaccaggtttttgcatgtctatctccttatctcatcacctcctcagaaagtctctaactcacctgtctaaatactccttccctccactcctctatggaattatgtattgtatcaccatcatttattttttatgttaaatagcatttatcctatattaaaacatattaagggcttttttctcctatcatctctctttctacccaaactaaaatttaaactctatgggagtagaagtctcatctgattgtatattgcaaatcaaagtgactggaacacagtagatattaaataagtatgtgttgaatgagtaatattaaaccatccaagttgactctgattgtaaattcatataatctatcctaaacatgaaacagggaacaatgggaagattttgaaccattcctagaaagtagagacaaatgtaatcccatggtacaaaaaaggcagcattaaaactacctcccagattgatgtggaataacttgtagcatgttaagcctgtgcctgtaagaacacattgaacatttaccgtgtgctcacatatcacagtgaatcagaaaggacagaattgatccagagaatttgccccagagaatttgccaactggtattgtcatttgattctgagtaagatgcttaaccatataaagtgtactgtaaattatggatgacaacactggccacatctacatcacatagagatagtttgggaggtaatgagatttttacttgaaatagctgagctccctggggagaaggcagaaaggggagatgaaataaattgcagccaaataccattaactctatatatttacaacataatttacactgatatactaagctatcgtgtcattaagaggggcgctttgtctcttttctgcagattgcctcccttattgatctccatttatttatcttctacactttatggaacagggtttcctggggctttgtcaatacagactttcagggttgacagacagtactagaagcaactgggtagaggatagtactgccacaaaggcacatctagcccaaagggtaatggcattcagagttttggaggcatagatttagatgaaagtgttgcttaaaattggagtgagagaggtgaccaatattgttctggttaaagggtgttcatggccaaactctatttaccagactatgagagcaaatgctgggtgatttaagtaggagtcaagacagaaccaccagcaggaggtgggataaatgttaacagagaatgctccacacaagactctaaggctctacaaagggttctgggcctagcagaaaataagaatacaaagatgaagagtatatagtacaatggttaggactgtgggctcccataccggaatgcctgtatttgaatcctctgtctcttccacttcctaagttaagggacctcaagcaattgacttttcttctttaaaaagaagattcaatttcttaatctccataagcgatcagtgctaaaacatatagaatgattgcgaatagcaaaaggattcacatatttaaaacatctagataggattcagccacataaggaatagtaaattttgtttttcattgtcattgtcatcaccatcatatcccttatcaaggtactagattgtggccgtgaagcttagaccgagagattagatggggcaggtgctgatggagccaaccagaaacatttcaaaccaggtgccacagatttaactgtggaatatcagatacaaaagtctattggacaaatgagtgtgtcccaagtgccactaaattatggaacctagttttccaataattttgctgaccaagtcaaaactagctcaaacaagtgattgagtagatacaactttgggagaactgggacaaaccatgggaacttgatgatctaacggtcatcaatcaaggaaaaaatatcacacttgtctctttcaaaggctatattttagtctgtaatgggtcgtataaatatggggaaattactttttagtagcagataatgtagaaacaataaagaaattaactaacttttcagaaccttgtggtttgtatgcaattgcatttttcattatgttcttgtatccttgctctttcttaaggcggaattacctttcctcttagacaataaagagaaattgaacaactgctgagacaatcattttctttactaaatagacatgaagttcctcaaatagtatataagagagatgatctttgttttactgtttatggtgccagtcatctggcctctaaattgacctgcaagcagggctatactttgaccactgtttatattccaaccagatgcaagtggagttatgaaagactgtcataaaaaaaaagaactcaggaaaatgctctccatattctctgtatctcctgttggcaaaacacataatttcccctgttgtgatacaccttaatcaaaattctcaatgcatttgttaattcataaaatatttctgaggattactattagtcacacatgtgtttggcaacaccaaggctgcaatgaacaaggaacatttagtcccagccttacaaaatcctactttctagcagattcagtataaacagataactaaggaacatgtacattttcattcctcaggtgagggaggggacacgactaacatttttagagtgtttatggtgccagacaccacgctggacactctatagatctttggaggggcagcttatctttttgcaggtatactcagtcaactacatcaccactgtagctgcctatctagcctcaaaatcttcaaggaaataagtccacaaagcttgaaaggaacaggacatccagaaagctctacacatactatccttcctcctgcacagtgtaaactttgaattctcattttagtagctaacccaccagagagcgataacttcattttgctatgggctacaggaggtgaagatagaaactgcattttggaggcaatggcctgaaggtaggttatttccatgcctagacttagaacatgttatctttaaacagagcaggcaggagaaggaaaggaaggaatatcaattgatgccattgccttcacaaatccttgatgaactgctcagtagggactaaataattggtaatagctattgtgtttattgtgtatagctaaaccagaaatgagtgttcatggaaatgtcattctataaccaagaaaaaaataaggaacaatgatcagtttgacattttaaacaagaggcatattttcatttggttcaataagaaaagtttctaagcaacgtttaattatattttacaccagatttcaggtgtgcttaattgcagtattaacttctttaccaaggtctcctaaaatacacttggttactattctgagaatgtcttcagtctctcttcatgaaacttggtgagacaacaaacaaatgatatgtcatcaaaattaacttgttaaagggaacaagaattaaaattataccttaaaaacttttccatttctgaaaagaaaaacaacgcacactattaaattcctggctcagaaggtgaaccaatatgaatcctttcttgaatctaatcaatcattttggcttgcttgggactataaggttttgtggacagtggagtttcagtgttaaaatggcagggttcccagaaaaccagaatgagttagtcaccttcctctcttcatagatttgtcgtgataattaaataaaataatgtctatcaaaggcatatcataaaatactttgtactcacaagcattgcgaaatgtcagccattgtcaaagtacttactatgacaggtgtggtgctaagcagttagttttacaagagacctttctgctcctgaatatctcagcttgcataatggacgtcagggacagctcagagaggggaatgagtggagagcaatagatatccttttctctgggacgggatgaaaggcatttacatacaaaattgcaatagtagggacagctagagagggctgctttgagcctgagaataggctcctgagaaagatttcaggtgtgctgaaagatttcaggtgtgctgaaagaaagaatgagggaagctagtgaattatctatagctgagtaaattataacggattaccatcactaaaatatatttattttatagtctaaaagcaaatgttatattttacatatatatgtaaccatatataataaatatatatgtaataataaatatatataattttaaaaagcctcaactgttccacactaactatacctctgaatctgaattttctaggctgtatatgacataagaagtgtccctatttcataatgaggctttcttcaatgagtaagtgagataatttatgtctatcacttttcatgttttaagtactcaatatacccatagattattatctttttatctttttataacagttttattggggtataatcaacatatcatataatttaacctgttaaagtgaattatattgagtgaattcaatagtgttcagtacatgcacagttgtgcaacagtcaccacaattaattttagaagatctttgccctccaaaacatccttctatccttttagctattaccctccacttttccccaacactccaggcctaggcaaccactctagagaattgcctatcctggatatttcatgtatatttcatttaattaaaattaaacaatatgtagtcttttgtgactggcttcattcatttagcataatatgatgacccatgttgtatcagtaaatcatttctttttattgctgaataatatttcattgtatacatgtaatatctttatttataacttgatagacatttgggttgttttcatcttttgagtattataaataatactgtcatgaacattcatgtgcaagctttatgttgacatatattgtcttgttttttttttttctttgagacagaatctcactctgttacaccagctgaagttcagtggcacaatcaaggctcattgcagccttgacctccctgggctcaggtgatcctcccaccgcaacttccttagaagctgggactataggtgtgtgccaccatacctaactaattttttttatagagataggggtttcaccgtgttgcccaggcagttctgaaagtcctgggctcaagcaatccatctgcctcagtctcccaaagtgccgggattacaagtgtgagccactgcacccagcacacagacatatattctcatctctatttttttttaaattatactttaagttctagggtacatgtgcacaatgtgcaggtttgttacatatgtatacatgtgccatattggtgtgctgcacccattaacttgtcatttacattaggtatatctcctaatgatatccctcccccctccccccaccccacaacaggccccagtgtgtgatgttcctcttcctgtgtccaagtgttcttattgttcaattcccacctatgagtgagaacatgcggtgtttggtttttgtcctggcgatagtttgctgagaatgatggtttccagcttcatccatgtccctacaaaggccatgaactcatccttttttatggctgcatagtattccatggtgtatatgtgccacattttcttaatccagtttatcattgatggacatttgcgttggttccaagtcttttctattgcgaatagtgccacaataaacatacgtgtgcatgtgtctttatagcagcataatttataatcctttgggcatatacccagtaataggatggctgggtcaaatggtatttctagttttagatccttgaggaatcgccacactgtcttccacaatgattgaactagtttacagtccccccaacagtgtaaaagtgtttctatttctccacatcctctccagcacctgttgtttcctgactttttaatgattgcccttctaactactgtgagatggtatctcattgtggttttgatttgcatttctctgatggccagtgatgatgagcatttttttgtgtgtctgttggctgcataaatatcttcttttgagaagtgtctgttcatatcctttgcccaatttttgatggggttgtttgtttttttcttgtaaatttgttggagttctttgtagattctggatattagccctttgtcagataagtagattgtaaaaattgtctcccattctataggttgcctgttcactctgacggtggtttcttttgctgtgcagaagctctttagtttacttagatcccaattgtcaattttggcttttgttgccattgcttttggtgttttagacatgaagtccttgcccatgcctatgtcttcaatggtattgcctaggttttcttctagggtttttatggttttaagtctaacatttaagtctttagtccatcttgaattaatttttgtataaggtgtaaggaagggatccagtttcagctttctccatatggctagccagttttcccagcaccatttattaaatagggaatcctttccccatttcttgtttttgtcaggtttgtgaaagatcagatggttgtacatgtgtggtattatttctgagggctttgttctgttccattggtctatatatctgttttggtaccagtaccatgctgttttggttactatagccttgtagtatagtttgaagtcaagtagtgtgatgcctccagctttgttcttttggcttaggattgtcttggcaatgcgggcccttttttggttccatatgaacataccttgtgtatatttttgggagtgaaactgctgggtaatacagtaatgctatgtttaattttttgaggaactgtcagatatttttccaaagtaaatgcatcattttacattcctgccaacagtgcatgaaggttctaatttctccatatacttgccaacatttgttattatcattgttttttattatagccatcctagtgtgtgtgaagtggtatgtcaatgtggtttttattttcattttcttgacagcagatcatgttgagcatcttttcatgtgcttattggcatttttatatcttccttggataaacctctattgaaatcctttgcccttttcaaattgggttgatataaaatactattaagtaatttctatacttagtcagtacttaaagagtacctactatgttccaaatactttataattataatcactaacatgtaaaaagtaatccttcaaaatagtattgtaatttccatttagtttatgttgggacactcaagatcagcataaaaaggaaaaacttactaagctaacagaggcagatacaggattaggactaatgttcagctaacatggaaacccaaaaagctcagtaattttttgatgctaggtggccacctgagcacactgaagtaaatgaactcatcctctcttctgataccttctgtgatcctccaaattttatcaggaacgtgccctaaatgcacatctttgatgctcccctaacgtggagaataaaattcacactcctcagcatgccactgagacctacccatacttgatatgctccaccatcccagcctcacttgacgccattccctaaccctgtacatcactcagctggaaaaccacaagtttcccagtgtcctacaggaaatttgcacttttctgtctcctggaaaaattctactgattctacgggcagctcaaaagtcttcatcagctgtgctaaattcttcttgtcccctgcaatcacattcctttccctcttcagcacacatactgttccttaattcaaccagtactgctgtgtaagtgtgatgttcctgatgtgtacaaagtaatggaggcataatagtggacatagtccggtccctgacactaggaagctgaaagtctagccagagtctgtttccactgctatcctgtaaactgtctgagcccagggatagtatcattaacttttatcacctcaccagcaagcacattccctggtaaaatctagattacaaaaaaggtatttctgatattttactgagactaccaacactcatacatcttgcaggagatagactcttctgctaatgacaataaatggaagggaactctggcaataaactgctgagaactgcacagcagcacttcccagctatctgccatatgagaattagaacaaaacaatgcaacccaaatgggaaggtggaagtgcacaatgaatacacaaagctataaactaagtgataatttttgtcttgattgtgtgagctaactattaagaagattataattaagagttcatttcttatagtaccaacaagcattttaatcaaccttgatagcattagctccaattaccattagtaaactataaagattctgttttaaattgcaatgagtcaataaattcaagatggcactttaggagtaaatgttaacaggaccttgtcattttcctgagcactcacaagctatggatgggggcttcgtgaaggcacaagcaacagtgggatttacgaagcgctgtgagcttcacaaacgctgtttgtactctggtgtgaaacgaaaaataattacccttaagaatgtttgataactgtttgatctatgaatttttagcttcatagctttaaagaaagacattttatttagccaaacaatctaatagactaacaaactcaaaacaaaggctgacaaagagagtcatctgaaattctcattattaacttacaacatttgcataaatttgaacagagatggatggctttaaatgacggtcactaattaagagaccgaaacaaacaaaagactaacaaaacattatgtacaaagacaagcacattagcatattctatctcatatctcccttaaaatgacatgaagacaaatattcctgattacacctgaagcaataatgtaactaaggcaataaatcacttgaagaaacctaagggggcttctttttaaacacattgatttgggtattaggactgtcactgaaatataaacataaaatggaatcaaatttgttgtgatgatgtatcactgaaacgtttgcctctttcctggaaaaatttaatcagtaggtggacatgtgactataacccagatgtatttgtttaaaaagactgccagattattagaaaactctctttcaaatgtccatcagaatagacatttatccctagtaaggcacatcacaggattgaaagtcaagtcaaaagtggttaaatgcttgggtgttgcatttttttgcttcccttaagagaagatctagaagtttttttttcaatgaatttaactctaaagtcttatttttaagatgtgtaacaaagttcacattgtgtgggaaaatttgacagtagggaagcaaagaaaggatagaacactgggcagagtctagctataactatgcaggggtggcaccacccattttcagaaaggccaccacaaagagacatggcaagaaagaaagtcccttgttggatgagccacgggaaatctgtgatgcaaggatttcagtatctcagacctgatatccattagcaccttggtacgcaaaacaaatttgttttacagactaatggtaataactgacataaaccctgaaaatttcaagttatttagaaatgaatttttttcaatcaaaattttgttctaacttttccaactattagaatcacactatgatgttatctgttagaatgttttgtaattttcttctctaatgtgattatccagttctccactgccatcattgaaatttcccaccaattctatgtataaaacattttacatttaggtaaacttaaaagacaccttagtagagtgttgataaacactccaataattaatcttgtaaatacccagaatatgcagaatctgtataaaaaatttatggtccagataccctgatcaaatgtctggataattcattcatttaccaagtgttggttcaatccctacttgcctactgcgtgaagtgttattcttagggaagttacttattttccttaaaatcaacatctacttttttgttaatctactgtgcagtctttagagaaaaaattatgaacctatagaatgtttcagattctttcaacaaatttaagaaaagagaataacactgcatggttccataataacaatttcagtactaccatcatttgcataaaggcaatgtctcttttactatataagaaggaaaaatatatctaaaaattcagtgctccttcagaggccacagtatctactatcctggcaatctttacagttttctcacttcttcgggggacagtctaccctctacttcttcagcatctccctatccctgatagacacaacctcagagtagttaagtgacccagaactgaccaatcagaagtttctgcattcctggtttcagtgattaattcaaaaactaaacatatttaaaaatcaatcatggccagtcaattttcactgggattactcatatggaacccagtataaatatgctgtcttatcctgcaatgttgctaacctgggaatgtagggctcctgtgttccccatgctacttttaaaaagctaactgtcataggctcgaacaagagcaatatacactgggaaactgagaaatacatgatggaacactgatagaaagacagtcctactctcactgagttctagttctgttctccagatgcctgctccctatagatcatcctttgacttgaactacccacaatgtgcttcctagtaatatatgtcaataaacttcacttttaattcagggtgtacattttcaccctgtaactgaaaaagtcttgattgacacttctcctttaatgatgttgaataaattagctctcatgctttggcattcttttattacatttccatttattgaacattgactgggctcacaaagcactgggctcacaagcactgggctcacaaagactaagccacaatccttatatttaataattaaataacatttaattatttgataatctttatattgaatatagaaaacttaacacgtgtggggacccactcagaaccccagagttggtatgaagattatttgatgctgaagaaatttgaaattcgacaaatgcagaaagaaatcttcttaaaacttctctcatctgagcagaagcagaaatttgtgagaaataaggcttccataaatccctttagggcaggtctactcccagaagagaaaccaagggtaaactaccacagattccctcttgggagagtttctaggccaagaaagagtggaaaaggccactcctacctccatacacaaacattattatcatacatcttttaatcttctgtctgttttcctaaaaatctatttgtctttcctaaataaaccatctgttcttcctatagaagccttttctcccccacccctttcctttagtaacttaggtatataggcctctaaccttagtcacctagctagcttgctagttcatttattagttctcctattcatgggaataagccttttttccccctttaatccatattttgtcagtttagttcacagacctcagagagcaaacttaagagggtaccagaaaagttttcctccctgacacacataaaccattaacataataaaaatttgtatattttatttaaaaatgtatagtataaaaactgtatattgaggaaatgtcctatagagacaatcacatacacatatgtcatcatcatcatcatcattatcagcttcatcaaagggcttcttttaaatgatgtgggggtaaggtaatcttcaaaacaactataatggatcttgacaaaataatttcaaagttctgaatcacttatttggtttaaatgagatttattcatcacaaattctttgggtctcatctcatccaaattgatctcaaatagaaaacatgctttttattctgatcatttactttacgtaaagggctaacacatgtatacttccctttgcaggcagaccatgctgaatactatatatatacatatataagactatgtagagtctcctatatatagtctatatatacatatataagactatgtagagtctcctatatatagtctatatatacatatataagactatgtagagtctcctatatatagtctatatatacatatatagtccttctctagaaatacatacaaaatatcagttcagtcttccccaatatgactgaggtagtcattcttattatccccttcttaaaaatgaggatcctgggccgggtgtggtggctcacgcctgtaatcccagcactttgggagaccaaggtgggtggatcacctcaggtcaggagtttgagaccagcctggccaagatggtgaaactctgtctctactaaaaatacaaaaattagctgagcatggtggcagatgcctgtagtcccagctgctcaggaggctgaggcaggagagttgcctgaacccgggaggcggaggttgcagtgagctgagatctagccactgcactccagcctggtgacagagcaagactccaaaaaaaaaaaaaaaaaaagaggattctgatatttaaagtagagagataaactatcaaaagttagagagatagttcaggatggaactaggtcttgtcaaagtaaccaatatcctctgggtgggctcaaagttgtcactatgactcttacaagaaaacaacagcaagggggtcagagtcagagatgaagctggaatggtgaaagcagtgttggagtaatgagaagccatgaactgaaggctacggtcagacttcagaagctggaagaaggctagaaaacagattctctcttagagattccagaaggagcccagccttgctgacaccttgattttagcccagtgaaatgaattcaaatttctggtgtgcagaactgtaaaaaataagtgtgttattttaagctgctcagttggtggaaatttattatagctacaataggaaaccaacagaatctcacaacatcttttcccagtggggaaaataaaaagtaatatttacatggcatctgccttggcaactgggggtgttctttcagaacctatagctgaggcaaaaaaataaaaaataaaaagaagaattaagaagatagagtcacatattcaggcctcattagaaattaaatctgaagcaaaagcccttatacttgatatgctaagtattaataaaagttatatccaaatagcaaggtgacaaattctggaaaacctttcatctgactctgcaatatcaatttaaaacactccattgatgtttcaatattacaaaatgccctggaaacacctgggatgatggagacattggtattaatatttttttccatgaataatatcatcacatttatcaatagcatactaagagggagagcatcaagataaatagctaatgtatgcagggcttaacacctaggtgatgggttgataggtacagcaaaccaccacggcacacatttatctatgtaacaaacctccacattttgtacatgtatcctggaacttaaaattttttaaaaagcataccaaatcactgagtttttttacaggatccttcaaaacaagatattaaatatttactaatcagtgttaataaatattctaaatatttttaaatataacattgcttctgcctgatccaatgatctagagttaatgaatttgatgatgctatcaaaaagctaaatatggcaatagaccattgatcactcttgctatgaaagaatggggactataagtcaataaataagtgggggctcctgttttcaatagttcgctgcccttgagtatgccatttttccctaaaagggattgaagatgggtgatggactatatgattaaaattcataaaaatgacatgttattctaagatgactgggtacagaaaatctcgtcagctcttacttaagcaattttccaaaaactggaaggaaacacagtcacacacaccgtggggtcacttcctgcagagatgacttggggacatagctgaatgaggctgaaaagtcagacctcacaagttcattataggtttagctgaggctggggcctgtcggactcttttttgtttgtttgttttttggtcaaggttaagtctgggtaagtctattcaggtatgttttcccagaatttaagctaaaatgatgaaaactgcctttgaacttgaaggttctgcggtaagtgcacaaattaaaagacatctgaaggtaggaagaggagacgttgcctttcttcttaatttgaatgttcagaaaaaccagtaattagattcattacgttaaaattgaacttaattcctttaatctgaaaatttcaaagggctttcaaaagctcacaaattgctgttaatcccaatggcacaaagatgacctatgtcattttaatggtatggtatggttgaaataaaaacacaagagtttgattattcctctgagggttcagtttcgttttgctctcccataaattaatttgaagagaaaaatcaacttggtgtcagtgattaagcaataattttaatgcatacacatgcacatgtacgtttgcatacagagtgaaatttattctttaaatagctgtagagaatctacaaaagcagagtacaaactacccagagtgaatagttagtatcaataaaactcatattccatttttactgtggaccatacttctagcaccagcattttgatcccaaacacaaaaagcacactggaattcctctctctctttctttctttctcactttttctctctcgtaatctccttcttgctatcattcatagcgctagagaattttagactagaaaagacttaagaaatcacttatttactagttcttctttttatacctgtgtaaactgatcaatcaaattaaagcaagttgactgggtaaatggagttgctagttaggaaaataggaattaatgcctacaatgactactgtcatctctttcaaaatctgtttaaaaaataattacatagtttaggaacacatagtgtggcaaaagggttttctttttgtatttttccttttgtttctatcacatagcatccatctttccttctcacgttagcacctcaacctagattgtagggaactactgtcccaccacaagcccaggcccctccagggggcttccaggttgaggcatgtggctcagaagtctaaccactcagagcatggtgttgccttggccagggtgtaggttctgttagggcatgtggtccaaagagggccaatgaggcatgaggccgtttcttctgaagccactggccaggaggtagctgctcttccccactgagactgaccctcacaggatgtgatgcaggcattgtctgcaaccacctagcaccacgtgaagccagaaaataaagccattagagtagaagccagagctgagagattaaatggattcctaatgacatattaaattaagttccacctgaagcccagaactaccacctgggcctctcaattatttgggccaagaaattgtgggtttattttttgtttttgttgaagccagtttgaactggcttttaagtcactcaagtactaactgggcttgccagataaaatacaggaggcttggttaaatttgaatttcagataaacagtgaataactttttttttttttttgagatggagtctcacactgtcgaacaggctggagtgcagtggcacgatctcggttcaacccaacctccacctcacaggttcaagcaattctcctgcctcagcctcccaagtagcggtataaacatttcctatgcaatattaggaaaatctgacaattctaattctaatcatacagcaagctatttctagacgtggagcagggccagtagagaaaggagagagacccatgacaatagcacagagacaggtgctgtcataagaagtagtaaggtgttgtatatactttcctggagaggagaagagctagttagttattacagtgtcatagagaaaaggcaatatatttatcaagctggtgttccaaatccctttttcctgctctgatcccatctcttccttggattcaacctcaagtcctggaattcatccagtaaggaaagaggtagaaacagcctctatgtcaatcatgacccactatgagttcagtttaattcattgtattccattaggcatttgcagacattgtgcagaacattgcaggggagcgtgggtgaaaaggtcctaattgccctattctaagggctctaatatgtccagaggaacaaatataggcaaagacaacaagataactgtaatgcctgatggattagtatggatggtggggggaaaggccaactctgaaaaaggtgggagttgagctagaccttggtggagaggtatagtatgtggggtgggtgggagtggtcatttcaaacacacgtcctcttgccatttcctatttttctttctgttcctctcctctcctctcctctcctctcccctcccttcccctcccttcctcttctcttctcttctcttctcttctcttctcttctcttctcttctcttctcttctcttctcttcgttctttctttcttccttcttttctcctgcttttctagtaattatgatgttgtttatcaaattagcatcaagtgcaaatctattaatgggggtgtgaccaagcatccaactggtgctggattggttagggctcatgaatatataattaaaattctataagggttgcattcagcaaatatgtagaattttaaagctggaagagacctttagcaagcccctgattttgtaggtgagagaacgaatgtgagatcaggtaactggtgatagttgcagatctgggactagaaaccaatgaagttatgctcagcatggttgctcgtgcctgtaatcccagcactttgggaggccaaagtgggaggatcacttgaggtcaggagtttgtgaccagcctggccaacatggtgaaaccccgtctctactaaaaatacaaaaattagctgggcatggtggtgggggcccgtaatcctagctactcgggaggctgaggcaggagagtcgcttgaatccaggaggcagaggttacagtgagctgacatggtgccactgcactcagccaaaaaagaaatcaatgaggttgactctagaatccaagcttcctcacctactaaaggccattaaactagcaggctttatgtcctgattttgttctctattaaagagtaccagggggaaatatacagctgaagtttattttccattctccatcagtctagaataatctcatttggatatttctcaaataaggaaaaacatggactttctctttaaggaatgacgatttgtgaagactgtcccattttacaaatctccgatgcccatgtacaatgggaaacccaaggggctccccaaacacttccatttgtctttttctggggcagacctattaaggtgccactgttcagaaaactcagcagcaagttaatttgcccatgttgaatgtgagtctgctgaacttggggtaaattgatatttccctatttcagatataaatgtagcaagaaaaaaaatccctttcagattcttaaaacacttggactgatttgctgagaaaaagccagcaacagggaattaaggagcagagtatcccatctgcaatgagatgtacagtgtaaaatcaggttatcagtgaaaatgagtctgatgtgctaattcatagcacattccctatacttacgttgtgagcccattatataatttagcaagattctggggcctttctcaagggagggcaagttctagaaaacagaggttctaggcaagcatgaggaaagtcctttaatgaaggaagaagtcaggtctatattttccaaaagcccatgctatttatacctctagcccctgatgttttaatagtgaaagaatggtgctgattttgacttttccctgaagcacacactttcacatgcaaggaaatgaatctttagcatatcctggatgaaaaagcaagaaatgtcctattaacttgaatgaggcattaaagggtctttgatgcagttcaacttctaaaacgcatatactttctcctccaggttacttatggtagacacattcttaactcctttgaaatgcagaatgagaaaaaattatttgtcttcttcaaattcactggctagatggattctctgcatgtacttcaatttccccaaaccttagtgctatattttttaaggaagtggagttattcaaaaatgataatacactcatggttgcaaattcagatttcttcagtggaagcataaataactatttcttccgtgaatagaaaaatgagtccgtgtaatactttgtctcttcatattatcacagttgtggatattataccaaatggtaacacagaataggaatagctcatcctggacttctgttcatagagaaagacaaagcatttagctgctaacaggccttgtcaattccccaaggcttccttgtaggcgggaataactccattcttttgctggtttcctaacaatggtagttgtattcataggctaactctcttccttttgctcttgccctttactgctgtattctaaagttttcagctctgcaatgaaaccttcagcatgaaacatccacacaatcccaccaccaaatgtctcacctgtacctgcttacacagcttgctctctctggtcatagatgcacaaccaggatctgatcttaggcctactttttcactgttctctggatcccacctcctctgaatgatgtacctgctctcttcttcatcattattcttccctcttcactggattattagcatataagcattctataatacatcctattttttaaaaaaaacaaaagacttccatgggtcccctcatccctgtgtagactgagatgtcctatgttctttataattaagttcttttgctctggcatcccttcttaggcattcctgagcccacaagcccattccagtgagactgtggtctacaccactctattgtcatgatcaccaaagacttttactagcacttatcttattgaactgatcagcagcatttgggagttggtaactgtttcttccttgaaatgtcttcttcccctggatacagtaagatactcttgacaaagctttctgtctccagggtgtttcttctcagtctccattatttattaagtataagcttaaataactttacatcctggaaggccccaagggctgtccttaaatctctgttattgtccatatccacacccattgaaattatattggctatatttgaaatatatctagaacctataaccaatttccactgctatcatcctagtcaatgtcaccatcttctcacttccatacaattgaaataggctcctgagaagtggccttactgatggttttgccacctacagtctagtctttcccaagaggccagatctatcctttaaaaatacgtgccagatcttgtcagtcttccatttgacactgagtataacctcattcctccacttttcatctagaataaaatttaaaatttccacatgatccactctgcatcatctctataacctaatagaacgacttccgtgtccttcacctaataccttaatcaattcctgttgctatgaccaaataccacagactgcataatttataaataatagacaattatttctcacatttctagaggccaggaagtccaagatcaaggtgcaacagattcagtttctggtggggacccatgctctccttccaagagggtgccctgtttctcctctggaggggacaaatgctgtgtccacacatggaggaagaccagagaggcaaaaagggactaaggtgctctgttctgcttcttttatacgagcactaatcccatccatgagggtggagaactcatgacttaatcactctcccaaaggcctcacctcttaatactgccacaccagagattaggttccaaccttagaattttgaagacacacaggcattcaaaccgtagcccatactttccggtagccatgctggatttcttgctgttccttgaatgctccaagcacactcccacctgtggttcttgctctcacagtttcctctgcctgggggggctctcccagcagatatcagtagcttgcttctccaaataactcagatatcatccaatacatttgtcccttgcatcctcattactctctgttctcacccaccagcttcatttttcatagtacttactataacaaaaaatttcacttgtttattatttttttcctgcttcttttagaatacaagctccttgttagcaggaatttattttattctcttccattccctcaagtctagaacacttctagttccttagtaactgcttagtaaatatctatggttgaatgcatctccatctctgtgatataacctcatccatatctaccttccttactgccttatgatgcctctggatgtaatttagattttgagtattttttctattcccaagtattccaaacttacacacacacacaatatgagcttacacatacacatcatatttttataaacatgtacacgtatacatagcatattaacaatcttcaatgatttattcaacatctaatataaaaaagtattattatataggattgtagacaaattctaagaatgttaaagcaattaaaagctattatgttataaaccaaccaataagtaaattgtatacattattttagtgagaaaaaaattctggaatgatggttaaatattagtctgggacagatggcaactgcatatgatttgctacatatccaagaattaactggtaactacactatgacattagttctaggataactaaatcttttttaatagctttataattgacaaaaattctttgcttgaccaaactttagtcaggcttttgaatcttctcctaggcctatctgtgcacttccttgtaaaaaccagttttagcaagaaccttgatgtcagtttagaaggaacaccccactcacactctgggttcatctgatcatcccctcaatatctaatctcatcctccatcctctgacctctcccaggtctgatcaccctggcctgccttcagcaagacacttgttaggttggtttggccagaatcccgtctccctgaagttcttagtaattttccgtccactaacatgtcacctaaccctggctccttaaatctaaatccccactttctcatgccatgtttggagttgagctcagtctctctcccccactgcaaaaatctcattgctttggtagctatacccatcacaatggtcatgaataaaatcttccttattgtgcatccttattgtgtatcattgagtaattctgtctttaacataactaaacaaaaaaaaacctctgacagtttgtcctttaaactagaacctctcaaacacgtcagcaggtatttctttcctattattggagcccggtatatttggcaaggcagtgcttaaggtgataaggatgaagactgcagtctgtggattcccacagaagtgactatgtgccactttctagttcagcaacttgcttttcctctgtatgcttcctgagaagtcaaagaaataacatcttttaaacacccaggatcatgcatgacacatggaaggacctaataaatatcagccattatcattatcattgctatttctgttagtccaagtattagcttcaaatatgtaaactgcatatagtttgttggggcagtctgaggttgctctatctcatcatcagggggtctcagtccatcacagctagtggcctgtcatcttttattttatgttatttatttttgttttgagacagagttttgctctcgttgcccatgctagagcgcaatggcgcgatcttggctcactgcaaactccgcctcccgggttcaagcgattctcctgcctcagcctcttgagtagctgggattacaggcatgcaccaccaagcccggctaattttgtatttttagtagagacggggtttctccatgttggtcagggtggtctcgaactcctgacctcaggtgatccacccgcctcagcttcccaaagtgttaggattacaggcatgagccactgtacctggccccgtcatcttttaaactgtaaagacagaggggccttgctctgtagctgaaagtcaatgcttctcggcctcttgcagctaagtagataatgtgtggctgaggaaagggaaacttactgaacttttaaagactatttttggggaaaaatgtcaaactctttaaaagagaggcattaaaaccctctcctatctcttcctcctaatctaatagtgcaaaaggcataaataatagcatcaacaatataggaatattttctaactgctagcattgtagcagtggcatcaaacagcactagtaaccactgtgttcctcaccatcacccacgggcaaaaagcaaataggccagtttcaattagtaatatacataatgaagaaaattatgacttttattaaatcacaactcgagctcatctttataatattctttgtgacaaaatgggagagatacataagataatcccattgcctacataaatatgacaattatctcaaggaaaagcgctgatgtaattgagttttgtgctgaattagccatcttgttcaagagccaatatttttacttgagagagtaactggcaaactatagttattcagactcagatatttggcagcattttcttaaagatgagcaaagttagcctgtaccttcaaggaaacaattgagagtattcgtgaataatgatgaaatctgagctttcaggcaaaaattattttggaaaactcatatctgctaccaggggcttggcagttttgtgatacttcaagtctttactgacttttaggttgatggttattttaataaatactgatttttgatatcatagaacaaaaactttgataacacttggaaatgtatataacttagtgaatcaatattttccaacattatgcatagagaaaagatacattcaaagttcaacatagaccttaaatgatttttatgaccacaatgatatatggagtgacaaggatctcctctcatcttttctgtgtttactgccttctagcaagattggactcttaatttatattttgctttgttttatttagtatgcctcttggctctactcataaaattccctctgcctagagaactttcccccacagagagtcacatggcaggctcacctcattcaaatctctcaacaaatgcaccctccataaataaaccatccaggttagccctatccaaagtaacttccctctatatctttattcttcctcattttactcataattgctgggcatttcctaatacatttattaaatattgctagtcttttccaagggaacgtaagtgccatgaagtaggaaatttgtctctttttttcactgtgtgttccacagccttgaacagtgtctggagtaaattatgtactcaacagatgtttgttgagtgaatgaatcaatgaataaataaacattgtaagttctaatacactcagggtgagagcagctaaatatcttaagcaaactcacatagctttgttggctaagctagaattggtatcagtttagtgccagaacctaaactcttaactaatacactattgcacattttgaactccctaaaaatttacaagtatacattccctcatttccattgccactttttattttagtcagataatctaatttaattgagaaagtcctgctttttggtagacaagccgtccctctttcaattcatacagttaaggagaaaaagaataaaagttatagtcagttgtaaggaaacttcaaataattatacagatataggctatcaggaatgctgaaataaatttgctcatgcattgcaacattggccaaactgatcaatatccacaggctaaaaaaataaacaactgaatctctctaggccacagctgtctttctatggataatttacagagttagaaaatagctcaaaacacacaaaggctctatagaatcagaaaaccaaacgaagccggtagacattgaagacttccaatatttttggtccatttcaaaatcttgtgcaactttttatatgtatttttaaaccaaagggcaataagtgtcttctaggagcaacaaagttaagatttgtattatccagtaatatgataatatagaaatattgacattcagagccttcccaaattctttgtcacaattttatgccctccaaggaaaactcagtgtcaagtggttattgagggtagcctgttttgttaatcaggagaatgttcaaagagacaaatcgcaagaatgaatttagagcaacgtaaattataaagattctgcaaggaggcacagaggagaaagagaagccaaggaaatacaggctaaggattttgagagagagtttcagaaggagaaaaagagtagagtagtgacattagggacagctcctgtggtgtgaaggtttgaggagagaggtttcaggatgttttgctgtgtttcattgcaaagtaattgttttcagtgcaattgtttcaattcaatggtttcaatgcgatgcaatttaattaatcttttagactttttttgagaaatgttattaaagccaaattactttgctctgttatgtttagacttggaattatatttcttttagattcaacaaccaagttgtgggtcttgatcagaaggaagcctggtgtgattctcgttacagtgacttgctgaggaaatttcatcagtggagtctgatcagatatagtgttgacacaagctgtatttctttctactatttcacttttaagtaatacttttagtaaaggttagttcacaaaccagtgacatcccaaatctgtttctttcttctatgatcttgggtttcactgtcaaaaatggcaaccacaggccccatattgctattgggcactttaaatgtggccaatgagactgagaaacttaatttttatgttatttggtttatatttaaatttaaaaaaggaacacatttagttttaggaaatcttcaagtttttttttgttttttacttttttttttcttttttagagacagggtcttgctctgtcactcaatctggaatgcaatggcatgatcatagctcactgcaacctcgacctcctgggctcaagccatctccccacctcagcctcctgagtatctgggactacaggtgtgtgccaccgtatctggttaattaaaaaaaaaaaacttctattttggagaggcaggggtctcactatgtttcccaggttggtctcaaactcctggcctcaagtgatcctcccaaggcactggaattacaagcatgcacccagcctcaagtattattttgaatactatgtttgtggatccgcttttctgaactgtaaattttgtaaaatttcaataaagatcaagcatctgtgctgaaaatttaccatatgaattaaaataggtaaaaaaaatactgcaacatttataaacagtgcagaaaagaaaaaataatatgttattagaaatgttatattgaagacatgttgaaataatatactttggataattgagttatgaaatattttaatctaatattcattctgtcgtgcaacaaatgtttaatgagtgcttgctataaaatacatcgttaggaaaaaaggggtcgataaaattgtgctgaactgaatataataaggtaaaaataaatgtatgtgagtgtatgagtgatgggaactgaggggaccatgcatgacagagatatgagtcaacttttcatggggaatttgagattctagtttgcctgtcatcagtcctgagggttttgaatgccagaccaaagcgaagaggaagagtctctgtaaagccatggaagcagcatgaaaaacaatgagcatgagaagagtaggaagacctgcctggttgaatgggaacatattttgggaacgtgaaaagagcagaaaaataagcacaatttgtaccaattgcagttgatggcactccttctacgagagtacagtaaatacactgcagagtttaaaaagcctagaaagacatggaaaataatagtatacttactatattttgttcaaattaacaatgagacccatggctttgaattcaaaagtgttctacctaaagagatactggagactgtaaaaaaaagtatataaagcatattactagaaattgtgattaaagttgtagtgttttaaaatagttctgcaaattctttgacggtcttgccttgcacaggtgttgcttgcttcccctcccctggaatgtaggtcagacttaatgatctctttggaaccacagaatgtggcagaattagtattctatgacttgcaaggttatcaacgggatgtagcttctgcctggtttttattcctgcatcactgtctctgggggaagccagctttcatgttgtgaagacattcaagcaacactatggaaaaacccacatagtagaacggaggccgcctgctggaagccagtaccaccttgttagccatgtgagtgaaccatcgagtggatcagccagccacagttaagcctgtaggtggcagaagcttggaccaacaccttgactgcaacctcatcaacaacaccaagctagaacctcccagccaggccatttctgaattcctgacccatgtaaaactgtgtattataatcagtgcttattactttaatgagttatgtggtacttatttttgcagcaataaataactagtaaaagcatgttatttaaggagaaatttatcctatgttttctgacctttcagatatcctgtaggtacctgaagtggcaaatgttgggatgagggtactatcttggcaataatggtctggcaacattgacaaagggattggatggcccacagacagacaacactgaaaggtgacagggtctattttagtctttcaaggtagaggtgacctggagaaaggcaatggcagcagaaatagagaaataaaagagatgaagcctataaatgccaggaattattcattcaaagacgatatcacattttttgagctagagtgactaattggtgctgccttagagaaaaatttttaggtgcttaggaagagaggttcgattttagacagtgaaatttagggtaacagatgtcttgaggctggaaaaggggcaaagagtttgtgttgatgtaaactgaactttgatgtaattgtcaagaggctttcttgggaggggtttgttgatatttactaaaaatagcaggaaagcaaacttttagatagtgagggccattgatcaatatttggccagtgagttggtttgcttatgaaaccctggaatcaataatgatggaaaatctacccatgaacctttggctgatggttctcaacaatgttacagaaagtaaatgaagttctataccactgatattaacagaaacagtgaagaccaaagaaaatgtctttcctcagttcctgttaataaggagtcagagttggccaggcaaattggctcacacctgtaattccagcactgtaacagtccaagatgagtggatcgctggagcccaggagtttgagaccagcctggacaacatggcaaaactccatctgtccccaaaacaaataaacaaacaaacaacaacaaatacttagccaggcatatggaggaatgtgcctgtggtcttagctacttggggggccaaagtgggaggatcacttgagcccaggaggttgaggctgcagtgagccgtgaccatgccactacactccagcctgggtgacagagcaagatcccgtctcaaaaaaataaaagaagtcagaattatcttaccagtttttgttttctatttcattcacattaagtagttaaaatcttgccctctgttcattcattttcatcataaagctccttctagcatcctcatcaaaggaggaagaggaagagctacagtgtactgaaacaaattatccccacgtatggggcacttgacatactcaatttctcttagctctgaagtactctaccatgtaagaaagggatgcttaccctcactcacaaatcagaaaatgaagtgtaagagaaatgaattgtccagagcctggattggaaacactcaagcctctagtctaaccattttgtagctctttgacagctgcttatcatacacacaaccaacagtcattctcccctttgttcctgctcataccatgttcttacctaacctgctgcttgaaaacctgcgatcccattgcatctcatgaaaaagccctctgatcctttccatggattccacatggattccctttccaagctttctccacattcttccttctttcttgaagatttctgctacctcagttcctcacagaaattcatctgacctctaaattaagagttggtgacacatggcttggcagtgaagaactctggattagccatttattagtactttggttaattgacttgactgtcttctggaaaacagggagagaccataacttatgctgctgtgaatttcttcataccttgctgattactggcaatcaattgcttttatatgtgtatttgattttaaaagatccaaacttgaaattatgctcagaaccatctcatttgtttctatgatatgtagatgccttttaaatctgtctatagcctcatactgggttttatttccagaaactccaccagctttcttggttaacaaaattttccacaatggtgcatgtcttttatatttctatgttaattttatatggtgttctgctacttttaacatgacttttctccattattccctggaaaactgcatcctttaagattgtaggtcatgctgacattggtatacaagcattcctctatcccttttccattcatgtagctactctgtgtttagataggagtgaacatgacacattgcctcagggggagcttcactgctataagccagagaacactgatatatctccttgccccagggttatgtgcaggactggcaagtagcccatatatatgtcgattcactgatggcatttcctcgctacaataactggttacagaattggcaggggcctcaggtggtcaagttagactaaccatcatatttttatttggttgttagggggaggctatctcttgatgtagacaaagtggcattagggtaagtagatgtgagacgtggtactgacagaaccatttccaagctctgagctaagctaggctgaggttggaactgccacatggaaaaggccagactcaggaaattcatcgagaaatggccatggaactttgatccctagccctgaagtctgctttacctctgggtgtttttagctacatgaaccaataaatgcttttaattgcttaaacctaattgagttgagttttccattacttgtaactgaaagcaccttaaaaaaatccagataaaatttaactccctttgtaaagccctctcaaatctctacaggcaggtcagtttactgacccttcttttcttccccataactttgctcatacagcactcatcccattggaagtgttgcactgcaatgaactgttttataatctgtttttccagcacactatgagttcagtaagaacaggaactagatcccattcagcgtcacatccctagagtgttacacattgcccagttcttttaggaggcatcaataaaggaaggaatgaatcttcagctcctttaccctggttcttatttcagtccctgacaagaacccagatattcaacagctgaggaaagttagagtttacgtagtgtctgaactgttgtattgcagtctgcagcagttcaacctatttatcacagggttattagtctttcccccaaaccacttttaaccaagtcccattacactccaagtccttctgaaattacttacagcttctgcagaatagaccatttttatgtccattcatttatttactcagcaaatatttatcctgcgcctacctgtgtcagtcagtagtgtaaacacacaacattaacgaaaaaatcttggccttacattctagcagaggaagttataaacaaaatctataagtaaatatagagtaggttagatgatgatatgttctatgaaaaaaaaagcagcgaagtgaaacagaaagtactagaggtggttttattgcaattataggcagagaggtcaggacagtctcaatgagatggtgacaactaaagaaggtaatggagatgtatacatatcttagagaaaaaaagtattcagagagagtaaacataaagtgcaaagactaccagacatataaaacaatgtccatagtcattaatcgtcaggaaaatgcaaaacaaaatcacaatgacttatcacctcacatgtatcaggatggctattatgacagaaaacaaaagacaagtgttgacaaaggtgtggagaaattgaaaccctctcaggctcctgtggaaataccactgagagagcagttgctatgataaacattatggaagaaccaccaaaaattaaaactagaactaccatatgatacagcaattcacttctgggtatttatccaaaataattgaaataggatcttaaagacatattagcactcccatgttcattgcagcactattcacaatagccaagaggtgaaaacaatctaagtgtccatcaatagatgaataggtaaagaaaatgtggtacatacaatggaatattattgaatctttaaaatggagattctataatttgtgacaacctgaatgaatctttaattttttttcttttttgaatatttaatttttatgggcacatggtgtatatatttatggggaacatgagatattttgatacgggcatacaatgcaaaataattacaccagggtaaatggggtattcacctcctcaagcattcatcatttcttttttttatgatcattctaattgtactgtctcagttgttctaaaaggtaaaacaaattatcgctgactatagtcaccctgttgtgctatcaaatgctagatcttattcattctacctaactatatttttgtacccattaaccatccccattcccccccagtccccactacccttcccagcctctggtaatgataattctactctatttgaaggagtcttaggacattatataagtgaagaaatacagttacagaaagacaaatactgcatgattccacttatatgtgggtacctagagtaatcacattcatagaatcaaagagtggaatgaatggtggttgccaggggctggaggaaggagaaaatgaggagctactttctgtccatggacagaaagagtcagtaaaaatgaataagctttagagatctgttgtacaacattgtgcctttagtaaataatattgcacaactaaatattgcatatttaaaaaggtaagggacacattaggaggctgaggcaggcagatcaccttaggtcaggagttcgagaccagcctgaccaacatggcaaaaccccatctctactaaaattacaaaaaaaaaaaaaaattagccaggtgtggtggcgcacgcttgtaatcccaactattcaggaggctgaggcaagagaatcacttgaatccgggagacagaggttgtagtgagctgagagtgtgccattgcactccagcctgggtgacagagtgggactttgtctcaaacaagcaaacaaaccaaataaacaaataaaaaggtaagagagtagttctcattttaaatggtctcactacacacacacgtacaaacacaaatggacacaaaacaaagaccctggatggagcacctggtgtgggagaggaaaaaccaggctggagagaggctggagcagagtgaatgaagaggagatgggtgggaaagatatgggatgataatatcagagagataaagcaggtcagtaaaccactgaactcttccgacgtaggcattttaatcacggtaaaatgagaagcttctgtaaagatttcacagacaacacaggatgacagtctcaccatcagaaggctggaaggcacagccatgtgcattattctggggctaagaaaagcagttgctttagctccacatagggaggttttatttaattaggatttgaaagtcatatcaagtggctctatttctttctaacaaagcccaatgtatttaattcctataaatattttagctaacctgtcagtcacatactttttaatataagggtagtggcacataagtgaaaatggaatacacaaagagtttcaaattatgtgtaacttggtagagggattaggaggcatcttgtaaagatgtggcatgtctagtgtttcactttgttttccctaagagaagactgagtaatagaaccacctttttattttctccttctgcaggcctgctgcctgtgattgatagctattaaattaggttttacctccccagattggtccagattaaatacacttatagcacagcaagccactgagaacaaaggaacaagtggcaattactttgtctattttggtcttcttcatagttaaccatcatttaagcattcaaaggaaaatggttggaagacaggaacgaaaggaaaatgaatgaaatgagaattaaacacatttcattgtaagttcctcaaatttataaatataagcttgcacacaagcatatttcttaagagaactgacttcaaatgcagaagcaaaagaggaatctcctggaatacataagtttattgaggtgatttgtagtataaccatctttcctgacctatcatgggactatatgtcagtcatatttgaaaagaatttatttgggaagaattccacttgttcaggactcagacagaagacagaatcacatgcttcctagacagtgatgccaaggttattactttgaaatgagtagggtcaaagtcatgctgatgagagaaaaatgcttttctcatgtgaaattgtgttctcttaaagataaataaatgaaatcatatttgctgtttcaaagtgtttgccttccgtgttttgtaaggaaatgatggcagcctccactcttggaaaatcgaactgggattgtagcacccatcattcttctctttctcaagagatcagggtcttcactccctctcactctatgaagccagtaaagtgtagacatagggaatccatatttcacatactgcccaaacataaggtcgtgcagagcacaagaaaagagagagactgtatttccatcacatgttggaaaattatgtttcttgaggtgtgtgtgtgtgtgtgtgtctgtttgtctgtgagttagtgtgtctgtgtgcttagtgggtccagggatgcaccagataagggacttaggtaaaggtggtaagaagattaaaaaaaataaaataaaaaataaaaaataaaaaaacatcaagaggaaaatctgtgtggttatgtctgagggtctcgtgtgtgaatttcctcccgttttgtggcattaaaaatgagttagttaaataaagtagcatttgcaagttcttctcctctgttctattttcagaaagggtcagaggaagctcatgatctcctggagagactcaatcagagctggatctggctgggaggtcacattggcccacccgatgtttgttactcaagggagagaatgctccagagagcacggtgtttttagcatgagatgtcatgaagtagtcctcggatttttctccctttgtggggcagaaagtagagctttgccatatttgctcacagataataagggacatatagaacaataaagaattccacttctacagtagatcttgggacatcagctagggtaggagtcactgtgccaggacatacacttctgggattgcctctccttcccagaaatgtgtttctcagtttggcctaagttggacattgtatcagttgaatggaagtaagtatttaaagggaatgcagaagcaagatccaatgctctataatgttggattgatctatgttttgggggcctccatgcagaaactcaaatagtagaacaaaggaattactctagaaagcagaatgtgtgtgtccagccttgatttctgtagccagataacttaagtctgaaactgtgaaggctctgtgatgataactatctatttgtctatcgatctacacacacactctctccctctctctctctctctctaacagggacataagacttctggatcatggatcagactatttagtcacagagcagcctgcatccgtgccttatgcccaaacacctcccgggcagtgcagtaagaaccagatctccctgtgcatataataggtattgtaccattaaaaaaggaaccccagttagttgggcatgatggcaaaagcctatagtcctagctacttgggaggctgagacagaagtattgcttgaacccagaaggcagaggttgcagtgagccgtgattgtgccattgcactccagcctgggtgacaaagcaagactccatttcaaaaaaagaaaaaataaataaataaaaggaaccccagaattatgaaacacagagattatatagggtgcttttccatctgtccctgcatcgctctggagagatataaagagacttttgctatgcaattttaaaaaatcatcttttgggagggaagaaagaaggtctttcctccaacatcctgccatgtaagcaaatgtcttcaggggagagaggaagtgtctatgtctccgaagctctctgcctttacacttttggacagttggggccattacagttgtccgtcaatcaccctttaacctgggtgctgatgttctttgctcagaaggctccaatcatacagaaacatgaaaatattcataaagagttgtttccctacaagagccagataataattcatctcttcagagtgtggttgtaaagtagaatgagattattcagggatggagataagaagtaatgaaaatcaaggaccagtcaaggaatagagaaagtatgtaattccttcagcctctaagtggaagtagctttgcctatgtagggccttctactcgggagttttcacctgtcctccataatgcactatgcatggaatacgaatcaaggttgatgcatccttctgctgcagttgccattctgccatattatattttcctgttttccatgcttcattgagattgaaactttcctatttatgactatagtccaagctctagcatcaagcatggtacttggaatgtgaagcatgtttaataaaataatgacctatgtgttattcccttccatcccaaacaatagcttcctagctggtttcctagtgcatattcctaactttcattatgtgatatatacaccaggaaaatgatgatgatgatgatgacaacgatgatgatggtgatggtgattttggtggaggaggtggagattattgagttagggaggccaaatttaatatcgcctctattattaagctacttgattttcaaaggtgttgcttctccacctataacataaataataatatcaattatatttaatacagtaatatctatcttaaaataactaaataaaattatgtaggtacagtacttagtatggtgcctagtgcccagcagggttgaaaaatgattagtgactgttatttatcattgttgattttctttttaaaaagcagtaaagcataggaggaaaagtaaggagagggaggaaaatattgagtttttttaggttaattctattaggctttgctccctgccaagtcattgttataaacaatccaaggagagaaggaatgtgtagaagagatttaggaaagaatattatgagaccaaatcctccaaatgaatcccagtccatgcagaaattgtactggcgacagctgttagatttgggcagagactaatgaagaattataaaggaggtataatgctgattttaattctgaatttgcacaggggtcattccaacgtcaaaaataattataaacaaagagatttcagttgtagttttgacactgtgcaagagctaggtcagacctctcatgagggctacagcctcccttatctctatttttacaatctgttctatgtatcctcacgaaatagacagacactgtatacctacttgtcaatgttggtgaaatgtcctaagttccactgaaaaaaacatatcaaaatattagcattactaaggaatgcattgcactggatatcttatttctttttctaattcaactgtaaaacacaaaattaaaatggcgaaataatgttctttgaatatctttgtatccctacatttctccccctcccactgccacctctgtacttcactgcaatctaggctgtcatcatcttgtttatgaactgctgtaatagctgcctacagggttttctctctcctgttttgttctgtcccctgcctccagttaatctattgtccacagcagtcagtacgatacatacatcagataaatcaatatcttgctgaaaagcattcaatatcttcctattagggagattcaaaaccctcaacattgcatagatcttccagttcctactctgatttctttgcagtgttctttatcatttcctgacactctaccctctgtttcatacatctttcccactctggaatatgcagtttcttctaagtggaataactgctattcaattttaagaccttaccttctgtgaaactactagaagaaaacataggtaaaagcttctcgacattgatctgagcaaactttttgatataatctcaaaagcaaaggcaacaagcaaaagcagataaataagattaatttaaaccaaaaagcttctgtacaggaaaggaaacaatcaacagagtgagtgaagagacagcctatgaaatgggagaaaatatttgcaaaccatttgataaggggttaatatcacaaatatataagaaattgaagtagttccatggcaagataacaaaaagcatgatcatataaagagcaaagaacctaaatagacatttctttaaagaagacatacaaatggccaacgggcatatgaaatgctcatcatcactaatcattaggaaatgcaaatcaaaaccacaataatatatcacttcacacctgttaaaatggctattatcaaaaagagaaaagatagctagtgttggtgaggatgtagagaagagggaacacttgcacactgttggtgggaatgtaaaatggaaaacagtatgaagaatcctcaaaaagttaaaaatagaactatcacatgatccagcaatctcatttctgggtatatatccataggaaaaaaatcagtatgttgaagagatatctgcactctcatgttcatggtagcattagtcacaatagccaggatttgaaaacaatccaattatccatggatggataaatggataaagaaaatgtggtatatatacacaatgcaatattactgagcctttaaaaaggaggaaatcctctcatttgtgataatatgaatgaacctagaagatattgtgctaagtgaattaagccaagcacagaaagacaaatactgcatgatctcacttatatgtagaatcataaaaagttgaactcacacaagaaaactgtagaatggtggttgctaggggctggggtggggatggaaagctattggtcaaaggataacatttcagttaagataaataagttctgaatatcttatgtgaccatacttaagaatattgtattatatatttgaaaattgctaaaaagaccataaatgttctaaccacaaatacacaaaaagataaatatgaggtgatagatattttaattagcttgattgtgttaattatttcaaagtgtatacatatatcaaaacatcacctctatatgagaagtcactcttcattctggatcaatataggacctactgaaactgtcatttcctccatcagaattcatatttcttctatcatattacttttttcaatattatctgtagtctctgatacactaacaatatcagttatttgcacctaacctctctgttctatgagacatatctctgttacagaaaaattggaaggaatgaaaagagaaagagatgatatttagcattttgtttcataaacactaacttgaagctcacagcctgcacacaatcatgaaaaccaagatgccgaaattacagacagaagtattttatattataaaatttctgcagcctactttttttttttttttttgagacggagtctcgctttgtcgcccaggctggagtgcagtgcagtggctcaatctcggctcactgcaacctccgcctcctgggttcaagccattctcctgcctcggcctcctgagtagctggaattacaggtgcctgcaactatgcctggctgatttttgtgtttttagtagagatggggtttcaccatgttggccaggctggtctccaactcctgacctcacgtgatctgccctcttcgcctcccaaagtgctcagattacgggcgtgagccaccgagcctggcccacttacctttttaacaagccataggatagagatgattggcaagattgctttaagggaagatctcataaagcaatcttgggggtgatgcttcaagtgagagaaagcaaggatggtcacaacattgaagtagttgggggaaacatcgtttatgtgtgtgtttgtgtgtgtgtgtgtgtgtgtgtgtgtgtgtctgcatatgtgcttgattcctacttttcatttcgtcacctgggaaaactgcaagcccagcagagaagctactatatttaccacaatgtaacacagtgccacacggacagaagtttacaaactgagaagccttacttagagaactatggcatggagaaagcaggtaagggctccagagtcccaagaaatgttgtgaccactggttgaccagaagatactacgagttaagatgaagaagtcacagaatgcaggaacttactaccatatctagaaccttagacttcagtaatgaatgccattacataccaagaaaaaacaattatgcccaactttatctcagtaggctacagttcaacataaccagggcccagatgggaccaatcacacttcatctgatattcttggaagtcaagagatagcacctggacaagggaactctcttccaatgatgagatgatcagtaatatttcttttgcactcagacgctatcttagataggtaggaggaaaagcaacaaaacccttttacaataagagacaaagtcttgattgtcactttcaacattagactgagtatttatgtaaaaggcactaagttgaaaaataattaaagcaaaagaaactgcaaaaaacataagtttgagttctattgctactaacattgcaagcgagaacgtgagttcacttaaatgagatataacttctaaatttccattttgctctacttacagaatgcattgttcctgataaggctcatttttttccatatgtaacattatacctagcacaaagaagctgccttctatacatttgttgaatgacaaagtaaatgagtaactaatgctgatttaggaaaggtaacaaattagtgattaacttctaacatgtcctcttaactgttagccacaaatcactatttctacacctcctcccatctctgttctccatgtccatgtcacaaagttcaatccaactgattttttttaatttcacagaattttaaaatatcagccatatgttttcactaaaatccatagagacaaaaccatgctaccagccagcatttgctctttgtttcaatgtacagtatcctatatttgagccatatgacttatgagaatttttttttttttttttgagacggagtctcgctctgtcgcccaggctggagtgcagtggtgcaatcttggctcactgcaacctctgcctcctgggttcaagcgattctcctgcctcagcctcctgagtagctgggattacaggcgcgcgccaccatgcccggccaattttttttttttctttttgtatttttagtagagactgggtttcaccatgttggtcaggctggtctggagctcctgacctcatgatccacccgccttggcctcccaaagtgctgggattacaggcgtgagccaccatgccaggccgagaatttttaaaaatgtagtgtttccttattttcccaagacttgatggaggatgggtaaagggatgcataaaagcacatttaccttttgtactagaaaaggcctggggtccatatctggactatctgatcttttccaatatgtgtaaatttcttaaaaacaaatgaggattggctgggcatggtggctcatgcctgtaatccctgcaatttgggaggccaaggtgggacgatcacgaggtcaggagttcgagaccagcctgaccaacatggtgaaacaccatctctactaaaaaaataaaacattagccaggcatggtggcatgcgcctgtaatcccagctactcaggagactgaggcaggagaattgcttgaacccgggaggtggaggttgcagttagctgagattggcaactgcactccagcctgggtgacagatcaagactctgtctgaaaaagaggaaagaaagaaagaaagaaagagagaaaaagaaagaaagaaagaaagagagaaagcaagcttactttttttaggttcatctcacaatattcttacaaaatataagatttctacaaaacctaagatttataaaatctaagaaagctgaaaggcaaactcaagcattaaaaagtggaactttagaaaatcacagaatgttatccatttctccactattatatcattttaagttagcagatgtcaatcaaatattttccagataagacagtcatagtgccacatgttggaagaaacaaaaactgggttggacaatcctgtccccaaatgtgcataggctattttaatgtattttttatttttcaatgattcttcataaattctttgtccttcacaacaaagttcttttggcaaaacactaaggagataaaatgtattcagtacagacatgagataggacaaaataatatgatgggggaagggacattggagaggagaggagaaatgagcactcgggagagaggaaagaaatagaatgatcctcaacaatctatttttacttgacctttgaaggactctggttatatattcttttctctatcttgccctaacccttctaaaattattaataaaataaaattataggcataaaatactacctaacttaactttaaaatcaatattatgagagattaacaaaatagccaattttcctaagtaatcttaactcaattaagcacttttcattaaacattttgacttgttaggggacaactaaaactgtctgcgataataacactatagtattttttataatgtgaatcagcaggacattaaaacctaactttctctaatcttcctaaacatcatatctgaagtgaaatatgtgttaaatatatatatgcacataaagtggtaagaatttatttaagtaaaagtaatcctttaaagaatggagtatgaaaaaataaaatgaatatgcaaatttttggaagatattttgtatattcaaattacatatttgaacgtatatgcacacgtcattaacacatatatatgtcattaacctttactataattctttcagaagttatgatgatataaattacattttaaaataaaaaagaaactcttgtgaatgtcaaacacatttgccttcactgttgtactgcatgctaacatatcttaaaagtggccggacatggtgactcccgtctgtaatcccagcactttgggaggccgaggcagtcagatcgcttaagcccaggatattgataccagcctaggtaatatagcaggaccccatctctatagaaaaaaatacaaaaaattagctgtttgtagtggtgcatctctgtcgtcccaggtactcgagaggctgaggtgggaggatcctttgagcaggggagggagaggttgcagtgagctgtgatcacgccactcactgcactccagcctgggcgacagagtgagatcctgtctcaaacaaacaaaaataccaatgtaatatgtggaaacattattgagcaataaaaagaaataaagtattaagacatgctacaacatacataaacctcaaaaactttatgctaaggaaaataaagaggcacaaaagaccactttattgtgattcaatttacatgaactctccaccaaaagcaaaggcatagaaaccagagtagtttagtgaccgtagatatggacacatggagtctttcgggtgtgatgaaaatgttctaaaattggattgttacaatgcttgcacaactccatagatgtaatgaaaataattgaatcgtatacttaaaatatatacataacaatattatgacatgtaaatgacaccttaataaagctatttttaaaatctgaccatttactcttggataaaattgtcaaatatttagactacacagaaaggagaaaaatgtataacaacagaatacttaaattttggaaacatttttgtggtttttttattctttgaaaaagcaccctttccgaggagtatgtaaacatgtaacttctttaggttaaatggagaaaaatgtatcctttgataaagaggataaatcaacattaaacatcgtttaagggaacagtcagagttagcatttatttatttaacaaatatttattgagcatctactaagagccaggtcacgttttaagcactggggataaacatgtaaaaaaaaaaaattagttttaaggcttttaattttttctccattgtttccaaaccttcagtgaaactacacttaacttctgtaaaatccaagctgctttttaatgaaatattttaattaagcatgtcacttttttaacttttttttttttttctttttcatttaagatgcctttttcagatcattcccattctcattaaacttcacacggatcatgacttttctgttctcacaaatgcaccccaactcagtctcagggcaagaccagctctttttgtgcaatggtagggtttacctaatttgggttggaattttcaatacatgactgagagaatgtttcagtctacttagtaggaaccttaacaagaaaagtggacctcagtacagtgatgttatgctaggaaatgggtgtgtctgtgaggaaattttagaaaaaggtatgatttacttttcctaggaatagtcagacttagcgtttatttatttaacaaatatttattgagcatctactatgagccaggcaatgtgttaagccacgggaataaatatgtaaaaaaaaaaaaaattaaggcttttattttttcttcattatttccaaaccttcagtgaaaccacacttaatgacctttttagcagcattgtgactaattaaaaaagggaccataccaatggttgggaaaggctaatgaaaccaagtacagtcttccctacactgcacttcctccgtggtccctcagaggtagggtacagtagtgagaacttctaggggataccctgcagggagcaggcttggtcttcagcagaaacgcactctgagcaagggtaactcgaagggactgactgagaagcaatggtgctcaattatgaggttcagataaatcacctgcagactcattaaactaaatccccaggatccagtctcagaaagatgaatacagtagaaggagtgagtaggagctaggtcttgacatgataggcataagaactgtccgcgtagggcagaagcaggaaatgaatttcgaggaagagttagccgtcctctttttcaaagtccttaagaaaactgacagccagaaaccatcatagccaacatgaattctctttccaagttgtaaacaaataaaggcataccagctatataggtttatgaagctgtaggctgattttcatggcagccaaagtaagcataagtcatatgaattgttcttataacttaaaaaaaatgttttaaacataaattaagccgcaagaatggagggtaaaggagagagtattttttttattaattaaagggaaatttgatacagtgcttgagcagtgacaaatacggtaacctggagaaactggggctggcagtatctgagtgggcttttagaggggtaggactcggtcaaatggatggtaaaacaaaacaatgattattacaggcatagtgctgtctctgtcattttctcatgctgttccttctgagtcagagaatgacatcgtatagtcgtttttaaagtaggaattacttgcatgcaatcctttttaaatgtaatgtcttgttttgccagtaacacaattgtccagtaggctcattagaccaccaggacactgatagagttccacagctgagggaggcataaaagtcaacccaaataaaagttaagtttcttcaactgatattttttacataagaataattcatatgacttcaggttactttggccagcattaaaatcagcctgcaggcttcaaaaaccactacagctgacatgagggatgatgcccacaatgacacttggtggtgggaggaagctatcatggaatcgcaatatttgggcaatttacaacgcgatgcccatagacgcaattgaaattggtaacatccagatttcatttatggtggtatgcttgctgactagccacaaggaaagatgatatcctgtgatggaaatggtaggaatcaaggtgcacattttctaggatgattttaagcttagctaagcctgtacaataaggaggacagactagactcatttctgaaatgctatttgattgtttttatgaaatagactttattttttagagaagttttagattcacaacaaaatggaatgaagagtagagagttcccatatactctctgcccccacacaagcacctaccccattatcaatatcttataccacaatggtatactggttacaatggatgaacttagattaatacatcattatcacccaaagtccacagtttacattagggttcatgcttgatactctacattctataggttttgacaaatatgtaatgacatatatccactattatagtatcatacaaaataggttcactgccttaaaaatcctctgtgcgccgcctattcattgatttctctctactcttccctggcaaccaatgaactttttactgtcttcaaagttttgacctttcaagaatgtcatatagttggcagcatacattacacagttacacagtcttttcagagtagcttccttcacttagtcatatgcatttaaggtccctccatttcttttcatgacttgataactcatttttttttagcactgaataatattccattgcctggatgcaccacagtttatccattcactactgaaaaatatcctgtttcttccaagttttggcaattatgcataaagctgccatacacactcactagtaggttattgtgtagacataggttttcagctcctttaagtaaaggcaaaggagtgtgattgatggatcatatgataagagtatgtttagtttgataggaagctgcccaactgtcttccaaagtggctgtaccattttgccttcccaacaacagtgaatgagagttcctgttgctccacatcctcaacagaatttagtgttctggattttggtaattctagtgatgtgtgtaatagtgtcccatttttgttttaatttgcaatttctgaataacttttttattctgataatttataattctgcaaatttatttatttagccctcaaactgggaaggaaattatttttaaaacccgtatctttaattatttgatgatttattcttaccaaatcaaagttcctaacttttctttcaatacaactgtgtccaatgtaacattaattaagcatttttaatcctgatctttctgttcatttaatccagtatgcactgagcatctatctattatcagtcactgtgaagataaagcaatttcccttaaaagaaaattataaaatcatcatttttgacaaggctgatatactttggtaccaatgacaaacctaagatagtatcttgtgcataatgtttttagcattagcagaattaatgtggttttctcctcctctggacttttatcaggcttgtgtttttatctagtacaatttatttccctattgacatatcttttatcttaatgaactaaaatattaacatgattcaatacaaacagtagtctattcttgcatcacgttttatacttactagcatgtattttaatcattgccacaaaatttcaaagtgataacggcttttacaaattactttccttcaaagagaaggtaaaaagaagaaactctcccttgataagggagggtttatcagtggtattctattagcaaagtagaagagatcagaacagtatgggggggtggggtcatgcaattacctttgaggaagtaagccatatacccgctatcaacatagtacagccatacttatgacagtgaagaatcctcaattacatcaacctgccccggctcagttctatgggtgatgcttcaaaagccattttaaaaatatcactcaagtagatattagcataatttagccattatttatgaagggtttagggtatgtcaactgttcttcctttttaatctttaatccttacaatagcctccgaaggttaaagtcactatagataaaaatggaacactaataggtaagaaatctgagtctcagagaggcttagtaacttacccaaggtcattgaggtggctaagtggctaacctaggagtcgaaatccaaatagatggtaaactcagctcttttcacccacactatactgcttctaaattggatcatggaatacgagtgtggagccaaagataaaaatagttacgcaatttcaaataaatccaaagactttccaaaaaaaaaaggcattgatttaaggttttatttacagaaaaacttcaaacaaaacatcaaagcaatgtaaaaaatggaatggaatatgcttctggtgtgcatttcttaccagaactatttcattcaataataaaaaatatggaggctgaggttgattgtcacaaacttgccatgagcatttcttcaataatatatattgaattaaagaggaacgaaggagaagggcaaggatatccaataaatttaaaaaaaaaggaaaagtaaggaatatagaactgtgtctatgaagatacataagaacatcaaagaggaccatgaaaaattcagggaaaagttaagagtctgaagaaccaaaggatattctaactaaattcaagaaagcttttcttgagaacattccaaccacgaaaaagtgaaatatggaacaaatcataaaggcaaaaagggcataagcaaaataattatttttataacctccatagtaccaaccataattctttagtttgctttgacgtcgacccttccgaggcttgatgttatgaatatttatatactgcataatgatagcaaaagacattcataaatggtagtcaatgatgttcagacatttataaatgtagaactggtctccaaaggcaatttggtcatagattacatgctatgtatcccagaaattatccagataaggttgacatattaccagagaggtacagagcatgagttagcactaaaatgatgcagaatggggatacctaagaaaatataggaggatattcaaatagggattgaattccaagatagattaatattttatggacatatagccaatggattacaatgattaaagactgaactaccactgccaggacagattagtgtccacgaaccccatttctaatgagaaacacagatagggaacattttaggaaaaaaaaaagtgactaatgatcttaatcacaatgtttggtacagttgaccccaaaccacaatgattagtcatttaataaaaagctactgataaataatatttctctagttactgatcaataataatggagtgcaaatatgactaaatgccctatacctgccctattgttctcataatctcattaaagaacaaagatataagaatattcatagtgtattcaatgtgtgaaaatggaagcatatatatatatatatatatatatatatatatatatatatatatatacaatctcctagaagcacacacatatggtggcagaaacagtaacctaattgtttactggagaaaaccacatcaagacattattccatgtgaaactgaataactccaaataaagcgaggaaaaatgtagattaggttcaagttgctcaatgaataatcacacttatttctcccaagagcccgataaacattgttagtctacattgcttctcaatctttgaccataaaaaagcacctcaatttagcaaagcacaatggttcccacaaagtacttaaggaaatcagaattgattctacttatattgattttggggaagatatgtgctacaaatgtggaacaaaaattatgatgttcaacagtcctaatgagtgcgtctatttacaagtgcaaaacaaggagatacaatcttgttgaaattttagtatctctgctcaaattagctgggaaaaagaccagtaccaaaggcgaagcaaatgatttttctgcattgtgcttacaaatgatgctcaatgaatggaaggtgaaaaaccagacataaaattcctggaggaaaaatttaggaaggcaaattgatgtgtaatcaatagctccatcaatgtgcaccagcattcttggtaaaagcaaacaaataaaaaacaccaagatcaaagcaaagaatttaagagtagcaggctacaaacagaaggtaacatggaccaggtcagatagttgaaccacagttataatcaggctgattttttttttagtagtgccatcgtcattctattaccagaatagatgattatcaactccagcctaagtttcatttctgaattctgaaacaaggtctcttgcaagggaggcagaagaatctctagatcgaaggatcagccatacctaagtctttctgtcatctcaaaggttaaccttgtgtagtagattaacttattgaccccaattctttcacctatcataaaattgtgtaccaatattattgccttatagtaggtggagtataatttactatatgaagaaatgagattcgcttaaaccaacaggatattaaaagacatgatgcaagctgaagcttgaaatatacatacgtaactaagttttctgttatgatttagtgatcagccatcaaaagaacattccctaggaactgttgtctattcagtctgagcccaaggacaaaaatatatggggctgggtgcagtggctcatgcctgtaatcccagaactttaggaggccaaggtgagaggaacacttgagaccaggagttcgaggccagcctgggcaaaatggcaagacccccatctctattaaaaaacaaacaaagaaacaaacataaaatagacctaaactgaacctctagcctttagccacacctagctaacccgcaatgtgaagaagagctatagcttcagccaatttagatcagacaaaatgagtgtgagaataaatactcattgtagtttggagttggttctcagcattattgtggctatagctgactgatacacatactcctaggtgtcagtaattggtaccttaattatcttctcttctcaatcatgccccagccttctagtctatctccaataaccgggtttatcctctgctatagccaatttccttcctaatctgaatctctttagctggatatttgctaacacttgtcacactttcccgatattctgcctaatgaaacttactatcgacttgcttccatataaataattatcaactgatttataaataatacaagacaaataacaattattaatattatcatttgttaataaagagttacaggtcaggcacatttaaatatgtgttttgtttaactttcacaatactgcaaggctgattttataatcggtattttctgggttcaatttctttattctttactactatttttattccaggctctcagctcagaagtaacctgcccaagatatcccagacagctggaagagatgccaggattcaaacccagatgctgctattcatgctcttctatgtcacattgtttaaacctcagcatgacgttttcaagtagtaaaacagatattcatgttacaattgaataatttttaaggataagatttgtccattacatagatctaaggatactgataaaattccttttctcacctgaaagacagtataaaccatgttatttggcaagtaaggtcagaggcataaagagggttggataagggacaattctcataaaaaatgttatcaattgaatatattctaagaaaaattaatagtaaggttttagaatttgaactttttttctacctgggaaactgcctagaaacattagcatcatgtaacatttgagtgctgggactctgggaccatataggaccctctccccacccaggaccactctgtggcctgttaggaaccgagcagcacagcaggaggtgagtggcaggcaagtgagcattactgcctgagctctgcctcctgtcagctcagcggtggcattagattctcacaggagcatgaaccctgttgtgaactgtgccatgccggggatctatgttgcacgatcctgaggagactctaatgcctgatgcaacagtttcattccaaaacgatccccgcccccctccccacaaccctgtctgtggggggaaaaaaaaaaaaaaaggctttccatgaaaccagtccccggtggcgaaaaggttggggaccaccgatagagaactgagttcaaattctgtgtctaactttttctggctgggtgttctagataagttactgctttcttgacaccttagttttctcatctgtaaaacaggtctaagagaagtaataacttcatagagttgttgagggagttagatgaaaagtgtcttgtaatttagcacagtatccagaacaggtatattgtggtcatctcaaaacatatgcactgaaattctacagcatcattgaaaacaggggtcgctcttttctaaaggagattggccctttcaaagcacagagaaaggcagggactcatgaacaaagatggggagaaggtaaggagaggagcaaaaaacttaaattgttttgatatagtgtgttgaaaaatgtaaaccaagacatgatagagacatgcggacacgtgaatatatgtttgagggggtatagtgggtgaagctttttaaaagatatgactatgggttacatttcacataagcaaccagatgctattctagtcagtgggactaaggaagggctttgtttaaaggtggctagaagcaatttaaaatgcagcaacttccactttgtgctagcaagatcaatccatgttttgagctgctgttttcacctcttcattgtttatcaggtttgagtctaattgggcttgattggaatcatgggaagccactaattaaaatgattaacaatatcaataacagcaaagagaatagaaaagaaagcctcttatttttaatgggcagaacacggattcttggtgtctgaatgaatagaagttaattgaggactgacagtggataacacatttctgaaatgtctattttcatgcttttaataaaggcacattttctagaagaataggagctaaaccaaaattataaatacagacaagatttttttttctcctccactaattgaattaaagccaattcttaaccgcagaatgtttgcaggcaccttgttatcaacgacttctactggataccgtgcttaacactggttatatttcagctttgccactgacctttaaattgctctaatctgcttttatttacaaatgtggtttctgcaaatgagcgttggatagaacagattcgagacacactaacaggacacaatccaggctcaagcagaggaggaaacagcgagctcccagatcgtcttcttactattctgtttgacaatgtcaggatgccttatttccagaacacaagggaagtcatttagacggcacatttctctacttaaagtgttcactctctggctaaaagggggttcatcatgttgttcctgatgtctaatccaagttctgccttgaagtagatgagctcaatgtcaagaaaatcatgtgtttgcatttggatagtcttactgactgctgagactgatatatacctagtcagagcctgggaaacacctgagccttcctttccttcctactaaaatttaacccagaaggactctgaatgaaggcacaggaatgcttgataaagttacttaggttccaggaacttgaggttgccttatactttgcttattacatctttactctttttttggatatttacttcccattgatatctaacttctgaattatttctctcccttggtgtaaggataactaacatttgcacagaacaccattgtttctaaaatgcattccaaaaatcactacacattcccttctcgccacatctccattcaggtaaagcgatggagtgactttgtttaggaaacaggttctggagttctgtgaactgaattcaaagactgtctctgcactttctgtctgtgtaactttgagcaagttatttaaactctctatacctcatgtccattcctgtaaaatagatggacctactgagatcgccctgaagattctaaagagagttcttgtaaaggtgattagaatattgcctggcccagatcaattatccaataaatgtcggctggtttactacttgaattattatcactattctgtgagttctttcaggacatggtagcagaccacacttatctttggatacccctatgcctaacacagtgcctggcagatagcaggtgcttaatgaacaactgtgccatcgttttacaaaccaacaagtccatattctaacaccttcaatccttcagatggagccaggataggaaaacacattttcttattcaagtgcaatgcttttcctgccccagctatatcccatcaaggtgataacttatttattttgcctcatcccctggacatattagaatgctcagcaatggaaatgctccttccatacttgctgaattgaattttctcttttcaatgctgtcttctggtgtggcaaaaaaagcagaaggtaattgactgtttcactatgcctctctcactacattgtttctcaggcaccctatatattttttctttttaaaaaatatgtatccatattcctttagcacagctgttttcaacaacaataacaacaaaaaatttcaaagcaaggcatactttctttaaataaaatcttttccagaagccaatttttataacaaataaaaagcagttcttggatatctctaggaatttcaaaaagcaagactaatggagccttgaactcgccatgcagctgttcttcctccatttcccattccgttctcctaagcccctgaggcagttttgttgaacctttagggtttcagtgaacgctattttaaatccactgtctcaggcccagcaattttggatgctcctaggtgcaacttatatttaccgaacttctttgtgttagtggaactgcttccggttttcagagagagtaaattgaaatatacaaatgcagtattaaggatcttccaaagtggcttaactaaatacgcagtgatagtgttcctaagccagatggtaaagaaaccctaacttttttgtaacaaaataaaagggctgatacatctcttacttttaatcttgttttaattaaagctgcagtggctaaagtgattagccaacatgaagtcaatggaacttaaggttttatgtctttttattttacaagtgtgtgtgtgtgtgtgtgtgtgtgtgtgtgtgtgtgtgtgtgtttggttactgatctgaaggagaatactgatttaactttcatgctcttgttattttagttcatacatgtaaactctgttttccagcaataagttctctgagtcttgttatgatcataaaatattttgcttttgaatcattagatagtgtgccttgccagatattttcaaagcgtgtgttcatttaaaggcaaagtttctgtcttataaatctcgctagctcttcaagacaacctgcttataactatttacatacacctcaaagttcgaatgaggcccaggaaagagacacgagaaggccattttggtggtggggaaggtaatatttctttactagagctaaagatttctaaggattcttaatgcgatttttaagcaatctgctgctgtttaataaatgtatataaagttactgagctatgcaatatgttgtatagagatatgtgatctttttaaaacttaagccaatacagtgaattttgtcattttaataaaagtctagaataagaaatacatattactgtaacagattctttcctgtgggaatatatgattcaaatatgtcttttatttaggaatctttttctattaagagccagctgttatgaatgtgagatggtctatgcacaattatgttaccaatattgtatgctgaaaataatcagaagggaattttcatatgaaatctagatggttatatgaaaaaaggtaataatagactattaacagaataccagatatttaaactaatgtggacttgtaaataaaattaattcaaatttaagttcatttacataatcattttattaattatagataattaacatatgctcatttaaatgttcatttgaggttataacttaggcaacattgctttaaaaaaacaatttcaggagaatttcaggggtacagccaagttatattaacagatactggaaatgattaaaaagtagagaaaggacggggcgtggtggctcacgcctgtaatcccagcactttgggaggccgaggtgggcagatcacgaggtcaggagatcgagaccatcctggctaacatggtgaaaccccttctctactaaaaatacgaaaaattaaccgggcgtggcggcgggcgcctgtagtcccaggtactcgggaggctgaggcaggagaatggcgtgaacctgggaggcggagcttgcagtgagccgacatcgcgccactgcactccagcatgggcgacagagcaataatctgtctcaaaaaaaaaaaaaaaaaaagtagagaaagaagccaacaagagggaggtccttgtctggccatcacctgcacctgcctatgtctctcctatgatgtgggaatgtagatggctttttcaaggctatgtttatgaatatcgccattaaatatttttcctgtatatccgcattagtaaacgccctcccaacttctagtggaatcttaaacagagttaagtctatcacagtaaatgaaactcgaggtatggaaactcttccgtataattcactgatagtttcaaatatgactggctgactaatacaacaaagccccttcccaacctctcttccttgccaatctccactgcagaggctgtgaaatgtacacatcttccaagacttccttgcaagttaggatgatcatgtgatacattcctggccaatgggaggtaaacaggagtctgctaatggctgataaaggcagtgcttcctgatcaatgggactgacatggtcagagctaacacatcccttctcccttcttcttgctttgagtatggatgctatggctggaatcgagacagccattttatgagtgaaagatgctcacaatagatatcaaactggctctaatgtggttgatccgtaaaactgaaacatgtcattagcttccttcaaatttcttgatacatgaggaacttaaggcctgtttaaggcagtgctggtttgcttttctactgcagaggaagcacctatcagtagatctgttgacaagctatctattcatagtccatctactccactttataagcaaatttctgtgaatacttctaactctcacctacctcaccttagagatcacaatccaagctcaggctcctcaaacactctggtttaaaaacccagtgaacttgcttattctctgacccaatgacaaaggaaaatgaaagcattaaattcagaaccctagccaaaacaattagggtgaagaaaatggaaactttcaaattcactagtatccagcttaacattgttgcaatatcattaatagtacaagccatacaaatttatgtataagtaatccatttggactatacatttgaaattgtcaagtgagtatattggtgagtagaacctttacatgtgttcactgtaatgagaataaccttctcttaggtaacctactacacagaagtacagatcaatactcctaatgcagaaaccatttcaggaagtatcaaaagctatcaattgtcatctaattggaagattgtttttctaagtgaacagctataaaattctgactgttcaaatcactgtaatcattttatttgccctattctctagaggaaccttaaacaaaccctgcagtgattgctttgttatttcaaatcagcctagtaattttccagtgtattaaaagacattcagtgttgacactgctaggaaaaaaattgggcgtccgccggatggaactgttcattttcagtcaacataattactctgtattaacacatctgctatttaaacatatcacacttttttgctaataattaacttgatgggatcatacatctctattcgacttgaataaatatcagaatcatttttatattgttaaaatagtgccaagccaaatgaaatgattgggcttgagctatttattgtcagtaacataactcaattgcatgacctcctttaacaaagcaaaacaaatcaaaacaaaccagcctaactcctagatatatagcaatttatgtaatatcaggaaaaagaaaattaataaatataaaatattttttccaagaccttgaaggctgttttatgttatgaaatatgcaatcagtaccaaaggctgtcaaaatcatcttccttgtccacagttctgaccacattcttcctttctcaaacctccagggctgcctgtcatcttctgtatcaaatttaaattattctcactgcttcagggtcttctatctgcccttgtttatgacacctttcttttttttttttttttctttttgagacggagtcttgctctgttgcccaggctggagttcagtggcgtgatctcggctcactgcaagcttcacctcccggcttcatgccattctcctgcctcagcctcccgagtagctgggactacaggtgcccaccaccacgcccggctaattttttttttatttttagtagagacagggtttcaccgtgttagccaggatggtctcgatctcctgacctcgtgatccgcccgtctcggcctcccaaagtgctgggattacaggcatgagccatcgcgcccggccacgacacctttcttaatgtccctttccccattgttcactcacaagagtcctaatttgtaggactttcacactgcaatataattgattagaagaatgaatgatgcatcaaaagtcaaaaagcacagaattaggcaaattatattacccttattgttttttgctcctcccatgggaaaaaatcaagaactactaacagatatttttcctactatgtctttctgtagtaaccactcatcctcctacgattactttcaaatctactgcacattcctcttcatttcaaataatttgtcagatatactaagcaggattttgtcattttaataaaagtctagaataagaaatatacattattgtaacaatttctttcctgtgggaacatatgactcaaatatgccttttatttagggatcttctgtaaattgtaaagtaggtttgaggctttggagaaagatttaatatttgttgaaaatctaatatacttacattacttcattacttcatttaagaaatatccactaaatatcatctatagaaaaagacaagatactcaagactggtcctactttccactgcttaattatttatgctgattttcgttttgtgttgtgttgtattgtttctttgcttttagttttcaaaatgtattctccttttgcattgttgctgagatcaagaaattgtactctgcactactatcttcacctccagaacctgccagtgaaagcttattgagttagagggtaccatagacatcttcctctcccaggcttgcagagattcgccaggaggaaaaaaaaagtgagactcttcataattttttccttcctagcacttgtggttcatcatgttaccaagcatcagtgccaaaagccctgactgatttttatccactggggtaatcaaaatcagttaggattcaagtaaagggcaaagatctttagtctataccctatggctttccatagttatttttgttgtgtccaattcatctcctcatattctaccttgaatttgtctagtcagaaaccactgttagctaggttgataatgattgctgcattgctaaatacaagagataatgttagtccatctgttacttggcacttcaggaacatttgatccagttgaccactctcttctcctacaatttgttgcttctttagcttctagcacacaatttcctaattttctaccattttcactgatggctttccatatccctttgctggttctttgtacttttctccgcctctcaacacttgagtgtctcagggttcagctcatgtaccccattcttcttctatcattacttattatcttgatgaccttatccagtctcatagctttaaatacctttgatatgctagcaactcccaagttcacctctatgttatggacagctaaggttcatattcaactgttcttaaatatctaataggtccctaaaacttaacatgaccacagccaaactcttaaggattcatctgtatcacttccatttgatcttttcaatctcagttaatggcaaattccttctttcagtttgtttccacattgcttaggccacattttcttctttttctctcacaacccatatccaatttgtcacaaaagcatgtgttgtcactacgacaaaacttatcaacattggaacatttctcatcctttccagctctatcttatccaaaccccactctctctaatctgtatcattgaaataatcttccagctgacctgttcccagctcaagcctagtgaagtcagtcatcactattttctgtgcagagcctccactagcttctcatcattctcaaataaaagccaaatatcttgcatggcctgaaagtcctgacactcctatccctccctctgtgtgaatgtacttctcccagataagtgcatggcttgccccttcactccatactgctgtagaatatgttagtataatggttaattctatgtttcaacatatctaggcaatgtcttcacagcctagacattgctgtgaaggtatttttaaaatgtgattaatatttaaataagtagactttgaataaagcagataacatgggtcgactatacccaatcaattgaatgccttaagagcaatgacaaaggttttctgcagaaggaattctcctcaagactacaacctagaaaccttgcctgagtttgcggcctgatgctctaaagaatttggactcaagattgaacattaaccaggctcttgtaaccccaccacactgggagcctgaggtaagagaattgcttgagcccaggagttcgagaccagcctgggcaacatagtgagactccatctccacacatacacacaagattagctgggcatagtcatttgtgcctgaaggtccagccacttgggaggctgaggtgggaggtttgtttaagcctgagaggttgaagctgcagtgagtcattacatcactgcactcgagcctggaatcaaacagacacaataaaaaatgataaaggggatatcaccactgatcccacagaaatacaaactaccatcagagaatactataaacacctctatgcaaataaactagaaaatctagaagaaatggataaattcctcgacacatacaccctcccaagactaaaccaggaagaagttgaatctctgaatagaccaataacaggctctgaaattgaggcaataattaatagcttaccaaccaaaaaaagtccaggaccagatggattcacatccgaattctaccagaggtacaaggagacagtggtaccattccttctgaaactattccaatcaatagaaaaagagagaatcctccctaactcattttatgaggccagcatcatcctgctaccaaagcctggcagagatacaacaaaaaaagagaattttagaccaatatccctgatgaacattgatgcaaaaatcctcaataaaatactggcaaattgaatccagcagcacatcaaaaagcttatccaccatgatcaagtgggcttcatccctgggatgcaaggctggttcaacatacgcaaatcagtaaacataatccagcatataaacagaaccaatgacaaaaaccacatgattatctcaatagatgcagaaaaggcttttgacaaaattcaacagcacttcatgctaaaaactctcaataaattaggtattgatgggacgtatctcaaaataataagagctatttatgataaccccatagccaatatcatactgaatgggcaaaaactggaagcattccctttgaaaactggcacaagacagggatgccctctctcaccactcctattcaacacagtgttggaagttctggccagggcaatcaggtaggagaaggaaataaaggacattcaattaggaaaagaggaagtcaacttgtccctgtttgcagatgacatgattgtatacctagaaaaccccatcatctcagccccaaatctccttaagctgataagcaacttcagcagtctcaggatacaaaatcaatgtgcaaaaatcacaagcattcttatacaccaataacagacaaacagagagccaaatcatgagtgagctcccattcacaattgcttcaaagagaataaaatacctaggaatccaacttacaagggatgtgaaggacctcttcaaggagaactacaaaccactgctcagtgaaataaaagaggatacaaacaaatggaagaacattccatgctcatgggcaggaagaatcaatatcttgaaaatggccatactgcccaaggtaatttatagattcaatgccatccccatcaagctaccaatgactttctcacagaattggaaaaaactactttaaagttcatatggaaccaaaaaagagcctgcattgccaagttaatcgtaagccaaaacaacaaagctggaggcatcacgctacctgacttcaaactataatacaaggctacagtaaccaaaacagcatggtactggtaccaaaacagagatatagaccaacggaacagaacagagccctcagaaataatgccacttatctacaactatctgatctttgacaaacctgacaaaaacaagcaatggggaaaggattccctatttaacaaatggtgctgggaaaactggctagccatatggagaaagctgaaactggatcccttccttacaccttatacaaaaattaattcaagatggattaaagacttaaatgttagacctaaaaccataaaaaccctagaagaaaacctaggcaataccattcaggacataggcgtgggcaaagacttcatgtctaaaacaccaaagcaatggcaacaaaagccaaaattgacaaatgggatctaattaaactaaagagcttctgcacagcaaaagaaactaccatcagagtgaacaggcaacacacagaatgggagaaaatttttgcaatctactcatctgacaaagggctaatactcagaatctacaaagaactccaacaaatttacaagaaaaaaacaaacaaccccatcaaaaactgggcgaagaatatgaacagacacttctcaaaagaagacatttatgcagccaacagacacaggaaaaaatgctcatcatcactggtcatcagagaaatgcaaatcaaaaccacaatgagataccatctcacaccggttagaatggcgatcattaaaacgtcaggaaacaacaggtgctggagaggatgtggagaaacaggaacacttttatgctgttggtgggactgtaaactagttcaacaattgtggaagtcagtgtggcgattcctcagggatctagaactagaaataccatttgacccagccatcccattactgggtatatacccaaaggattataaatcatgctgctataaagactcttgcacacatatgtttattgcagcactattcacaatagcaaagacttggaaccaacccaaatgtccaaaaatgatagactggattaagaaaatgtggcacatatacaccatggaatactatgcagccataaaaaaggaatgagttcatgtcctttgtagggacatggatgaagctggaaaccatcattctcagcaaactatcgcaagcacaaaaaaccaaacaccgcatgttctcacttataggtgggaattgaacaatgagaacacttggacacaggaaggggaacatcacacactggggcctgttgtggggtggggggaggggggagggatagcattaggagatgtacctaatgttaatgggtgcagcacaccaacatggcacatgtatacatatgtaacaaacctgcacattgtgcacatgtaccttaaaacttaaagtataataaaaaaaaattattcccaaacataaaaaaaaacttatttctttcacttagcatattgcatttgaaagttatatatgttattgggtatattaatagttcattgctttttattgtcaagtaatacattctattgtatggctatatcagaatttctgcaatcactttagttgaaggacatctcgattattccagtttcaggtgattataaataaagctactataaacaggtgcatacagaaaaaaaaaaagaaaaagagactgaacatcaactgttatctgaatttctagcctgtcggcctgccctacaagttttatacttgccatagacatattagccaattctttaaaataaatctgtctctgactctctgtcatatatgcatctacatccatacttttatctttatctttaacagaaaggtagaaggagatttgataattgaaaaagtaggccatgtgaaggtggagcagaaagagacttgaagatgctggccatgaagatcggagtgatgaggccacaagaaatgccagcagccacccagaaactagaaaaggcatgaaaaaattctctcccaggcctccagaggaagtgcaacctgctgacaacttgatcttggcctagcagtgttgatttcaggcatctggactccagaattgtgagagaataaatttctgttgttttaagtcaccaagtatatgctaatttatcatagcagccacaggaaactaatacagtagtgacttgctcatctgcaggggatacattccaagccccctagtggatgcctgaaccacagatagtagcaaatcctatatatacaatgttttattcctatacatacacacctatgataaagtttaatttataatttaggtacagtaagatattaacaccaataattgataaagtagaacaatcataatacactgtaatcaaatttacatgaatatgatctcactctctgtctttctcaaaatatcttattatgttgtactcaccctttttttcttgtgatctgctgacctgcttgaactgagagctactaagtgattaacaggcaggtagctatacagcatggatacctttaacaaaggaatgactcacatcccaggcaggatggagtgggattgcacaagatttcattatgctactcagaatggcaagcaactttatacttacaaattggttatttttggaattttccatttaatattttggaccaggttgaccatgggtcactggaactgagaaaaatgaataaggggaactactgtaggtattttgatactgctttgggaagcaagatgaggctataacaaatgcctaaaaatgaggaagtagctttggaattgagaaactgttggaggctggaagcattttgagaagcatgaaagaaaaagtctagattacttataatagatttttggtagaaatataagtgctaaggattctgccagtaagggatgagaggaagtgaggagtacaatagagaaaggttctagcatcttagagaatatctgtatatcatcataaactgattgttggtagaaatatgaaagttaaaggcttttttaagggctcaaaagaaaatgagaaacatgttactggaaactggaggaaaggcaatccacgttttacagtgtcagataactgagcttaattgtgcccttcataattggaaagcggaacttataaactataaacttagatatttagctgagaatatttctaagcaaattgttgaatatatggcctgatttcttctcatggcttatagtaaaacgagagaagaaagaaataagttgaggaagaaactgttaagcaaaaagaaaccaatagcagatgattcaggaaattctcagcctacccaatatacaaaaaatgctaaaattatgagattcagtatcagaaaactgtgctctggacagaaggccaagggtatggagggacatcctttttacttctgctcaagagattagacatatagctgagggatccactcaactgtctcagcataagtcagacatagagaggcagttatccaggaaagatctggggagaacttcttgtttgatgatgtaaatcctcctgacatatataggaggtccatcaagtttttgagaatattataccatcagaaacattgccagcctggactgaaacggagagagacaaggcaaaaataaagaaggttattggacttccaaattctacaggcaggaaacaggctgaaatgactactcagctgcaaacattttctattcttcaagaaagaagaaaaatggcagtgggctttgtggtgtggcaggcctagcagtcaggggcccaggcccagaaggtgctggtgtcagcccaaagagcagaggtatgggctgaaaggacataaccttgagccacagagagttattcccagcccttacacactaatggagcttacttggttgaattttaaaattgcctgtgactcttctttaactcctattttttctcttttaaaataggaatgcctataaccattatcttatgcctataaccatgatcctatgctggtcccaccatttgtatgttggtaacatgttttctagtttcacagttccagagatagaaaagaattttgcctcaagatggatcatatttagagtctcacccatacctaatttcgatcattagataataagatttaggactttggagctgatgatattgtagtaatttgttatagcagccacagaaaactaatgcagtgagaagcacttttttaaaaattgcaacactcagtcatgctttctatatcctcccctcctttattttttccacatctccatatcacatatatttaaattactttaagaataagaaaacttatatatatgtatatatatatatatactactttttactctttttaaagttatttgtctccctcaccattgcaatataaactccataagtgcagcaatttttttatctttttgttttttcactgctgtatccctggtgctgtgaatagtggtactggtacataagaggtgctcacaaatgtttttcagtgattaaataaaaattttccttacgtatatcctcatagaatttgtccatccctccatctacattccatccatccatccacccaaccactttccatctctgtataaatccatctaccctcttacatgtctatttaatagcaaacattcttttactcattagccccaggatctgtgcaagaaattcaatggtaagtaagacttagaacaagcctacagagttatttcctcttcattgggaaaacagtagttgaacttgaactattaaaacaaaatgccataattatcactagcggggaaacaaaggatgccagggaagcaaattagaataatacctaatctagatgagaaagtcttcagaaaatactctctcattatacaaacctggagtatcatctttcttacaaccaacagataatgtaaatctatagagttctcaaacttacttctgactatactatagtaaaaaaataagtatttgtgaagaaatgagcatttgctttaaaattcatttcagcttaaataatattcatatttatgtaaagagagatgggtgaatctaactgtccacttaaatcttccttttaattcccaagaataaatgaactgtccaaagcacaatcaatattaaagacaatccagaatactttagactttccgtaggtaaatatcttgagataagaaggaaagtgtttgtctttcctggtgttcagcatttttgctgaccatgaaaaaagatgacgaagtaaagggtgggggcaagagaagggagaggaggaggaagaggaagaaagcaacagcagcattttaaaggcagacagcttgtagtatatttgaatttagacaatctcggttagcacgctaaattggaaacctgatagttcaatggatttagataagccacttcacacatcagtgcttcagtttatcagttacaaaatgagtttgacatttcccttgcctatctatggaagtattataagaaccaaatataagcacgtgcagatactttgaaaagtttaatttccttacaaatgtaagttatttttcacaaagacattttattgagattctatgatgtgctgatcaccatgtatagttatttgaaaatcacaaataatttgggatttgcaattatgagaattgagggcattaaactttagatattctgcttacagatataaggacaaatgtgtggttttaaacacagagcaaaaacgacataatagtgaatgtgcaataggataacaggtgtttcatacattgagaacaacaaaaaaattggggtaatggaaattcaatgtcctagtcacaggcagtgggggaattttcttagatctgtgataacagcaagtggttttgttaatgtgaagctagtttttgttctgtggttattgccattcctgagtaatgagcaacgagatctctttcccatctggcattttgtggctgagaatagcagcagcataaggtgaaatgtcagtggtaagacacagtggtttatgtcatttgtaaaatatgatcacagactcaaacatccatggtgatgtgatatcccagaaaatatcccaatgcaagtgaatccaactccatgggggcagtgaaaagagattaaagtcaaaaaatagttttgaattttggttccactaacttaattgcctgttttgctcttggcccttgatttttctcatttgtaaaatagaaatgaaaaaatccctatttttcaaagtcatttgaagaattaaaaatgtgaatgtcctttaagttgtaacatgctgtatagaagttagtggtaactgctgtttttgtagataaccaaaaaattgattttgtccataataacagatgaaagcttccttaatgaagttgcattacacagtcccaagctttaccaaacacgtcagtggtgttggtaacagttatcaaaactaccttaaggtggtgtctgtaattttcgctaaaggacatgtgagaaaatattttgaaaacgtctttactgctaacaacataccaaataggcttcaagtccattttcaagcccaaagtcaagttaggatttaaggaaaaggaaactagaagagaataattcttaggacatctgaacattcaagatgattggagattctcattcatttaaaagaaaagaatgttattccttacaaaaccttatttactgaaataagaatttcatactttgatagctaaatcaaataagggttctgtttcttcccccccaactccgccttccagaagctgggaaggataatttacctccctaactgcttgacttaacccacagggacgtaggcactgaggggatctgtgattatctacacaagatgataataagccagataatttcagaatttagaattttaaaagaaaataaaaaattctccctaatgataccactgcattgtaaattctacacatcactttccgtagacatcttctagcatacagctaagtgtcttatatcaaagaccctgccttcatggaggtgggagaaggaagttagaagctgccaagagaaaagaatcttggagagtaaagggtagaaatttctggaaaggtttgagtctttcctactgccattggcactgctcagtgggttgggggcttgggctctgtcatcacactgctttggttcctgtcctggctatgtttaccaactacatggcttcagatgacttaacctgaatggagataataacacctccctcatagggcagttttgacaaataactgaagaagtaaagcacttaaaacagcccttagcacaaaataagcacatggtaaatatcagttaccactattgtaactactaccatgacacccatggctaaaattatcatcaccattattagtagtactattatactattatttgtcctgcatgttaaagtgtttcttcaaagaagtcagagcatgggaagaaagccacattgtctgctatctctgaaaaaaaaaaaagagaaggaaaaaaaacagaaaaaaagaagtcctttttgaaaaagtccttcataatacttaataccatgcaagttttcagggtaaaggctgtatgccttaataaagggaatgcattcttttgttcttattttaattaatagtaataaacctgtttcattctgcatatatacttattcaagaagaggaatgtttttagtagatgagagtcttgtggcaacccatagtttaggcaccttttagccattattacattattttctaattccttatggccagtcattttagaactacaggctcaaagaaaaggtccccttgttttgcaagtgaagatttgtttcacaggaatgtgtgagtcagctgtctgatagagtgtgcaggtttgagggggaggtatgtgggggtgagatttaaagcatctaagatccctcccaatgttgacacttaattatctggaagaggataatgacttaaaattccagaaaagaatgattatgacaggaaaacataagtagtaacaatatattgaaccctttatatgaaagaggtagaaggtcttgtacctagtgaacataatctcattgaattcctccagcaatcttaaaatatgggttttatttacctcatattacaggtgaggaaactgaggcacaatttggcgatgtctctgcagagaactaaatgatcagcagaactgaaagccccatctaggcttattaaaatccaacaccctcactctttccaggatgtgaaacttcctggagcccttcttcatgccagtctcacccttggccctttgcctcagggagctcactcaagcctcatcacagagctagaagtgagctatgattatccacatgacacatgtgagggcactgagaccccaaagaatccccagaaagcagatctggcattcatgatcagcaacacaataaatgctgccttatagtgtttgattttctggtggcaagttatgtcttcttaaattgccagatgaacgcaatgcccatctcctttcagctagcacattttctctttgccagggaagcagtgctgcgtgatggctgagcacctaagctctaaagtcagactgcctgcctttaaagcactgtcctgtcactcaccagctggtgaacgtgtgaagtttcatccatttcttcatcttgaaacaatgacctctgaggcttgttgggagcatcaactgagtcaagtcatgtgaaagcattgggataatgcatggagcctaatgaacactcaaaaacattaactactgttgttgttacagttggcccagctagaatacactttgtcaatatggtcctcagaccattgcctcagaatctcacagggtaaggcacctctatcattaagctaaaaatcccattttaattcaacaattgaagacgtgtcccgagattttacttttctcacaatctcccaacagtgccaacgctgctgaacgaggtgctttaaatagcaaggaaccagggaactttattgactacagatttagtggaccctattccagacctagtaaatcagaaactctggggaggaaacccaggggaataaatgtttaactcactctctaagagattctaaggcatgtaaaagcttgagaaggccgtgagagaggcttcagttggttctaacattatttgacagtgcaattcactggagacacagtctgatcgaattcctgattcatcatcttgactccagggtaaaatgcttctgatatgctaagaaaccctcatccttttctgtaacaaaggtaatgagttaattttccaaatagggtaagtagataatccttctcaatttaccaacataactcacccaatattaagaagcattagaaaaggcatccattttgccagtgcaactaagcagtagttttctagcacaaatattagaggcaataaagaattttattcaaggttgacagctttagcaaacagtttctgttttatattgatgctctcttattttccatgttttctcagcattctggatatagcaccactaaaaaaattcttttggttaaattctgaatagtttaagctttaaaatgcaacttattggaaagatacaggggtaggaatccaagaaatatttggacaatcctcgagtagggcagtgaccaggttagctcatagggtgaccaactgctttagtttactcaggaccatcctagtatcagcactgagagtaccaagttctggagaatccctcagtcccaggcaaacaaggccagctggtcccactagtgccaacctggcagtaggctttctatggatctcttaatatgagtcagattacattgctcttattctgtccttttccaaattccagattcctgacaaagagaattttgctggattagcttgggtcagatatctacacctggcccaatcagaagtaggcaaataacaaattgtgctgtcctcccttttcctcaagctgtccagggcccaacactgtgaaatagggaccaattcgtagagaagacaggatccaggcaaggaccctaaagggcatctattacagtctttcagaaagtgtctccaattactttataaactcacctttcctttgctttgctttcctgaatgcacccagggatctatgagctactaaaatcaaccatgcttcactaggtcacagcagagggcttggttgtgatagaaaacaactaaaacgtgactgacattcattgagcacttgatttatacaacagatatatagatgacagatagataaatagatagatatgtagttttatcagataaatccagtgatgtaggttctattgcactcattttacagataaagaaactgaaggtttttttttttttcagttatgaaggctaggaattgaaccaagattttctagccctcaaccaagtttctatctacaacacccttttttttctttttcctctctccctccctttctttctcatcctctctgttcctctccctatatatgtatagtcatattaatgtgatagtcttacagatattcatatatatatatatatatatatatatatatatatatatatatatatatggacttagatacaattgtgtatgcttaacagttaggattttccgtattaggctcagagagaattggctaagttgaacatttagtaagtggaaatctttgacactgcagattaaactcaaatattttaattctatatctagtcctccttccatcgtatttctccatcaaactttttaatgcctcattatctgttgcttaatacgaagagaagaaaacccaccccatttttatatctgcaataatggctgaagaatttcttctatgtcttctctgggcaaagcatttgctgagcacttgatatggtattaccttcaaagaaactctgccagttacagggacattaagtaatttccccaaatccatacagcaaaaataagggcagagcaagccatctgccctgaaattccttgccctttccagttcaccaaattgcatctttgaagtcggatcaagatttgcgtacatatcctaccagtctaagcacgtttgaatgatggcacattgtctcactatattgaggcaactcttccttgcttggctgttactcataattaggaatacagttacatctttcactttggtccaatttttatcatatcaatgtactacccacctatatattttcttaatttatatttctttaaatcaacttattttttatgtctggccctagtaattatatccataaagtccaagacgtagtgaacttatttcataatttataagatgaattacaataaatatgtaaacattttaaaatgcatgtcttaaggaaatgtttgaatcaacatctaagaaaaattggtttgcccagtaagtcgcgtatttgtggggtcagctagcctgatccagcctttacagctccatgtagatttgctcttcttgactattgctgggtggtccccactgttctcacatagccaaataagttattccattacaaaattataactaattttttacagaatgaattatagattagggtgctctgcatgaatttgcagattcccaaagatctcaagatgtgtcaagaactccaagggatctttcacttcgtatttcaccgccgggtcaccctgggctccaggctatcttgagctgttttcacatcttctctgatggaacattttaaatgaggcaaattctgaatctgaaaatctttggtggcctttgcacatatcctcttcagttgtggaaaaaaaacatatccattgtatctgacttttcctttttcactctccttccattttactgtctgcttcattgaggaaatctttcatttagtggagtctagatttcttcctttgctaccatcttcatttcccaccaaataaatcaggtctcagcttatgatcatttgtcatctgctgcttcttctccgggaccgcccctaacagcctagcagagctctgggctgtattccatgatctcttttaattccttgttggcggcttgctggccctttctctttaccttcctgccaggtttaatgccttttagcgtgccagctctgtttttcacaatttttccaaaatgaggtggaaaatcaaatctctagctcctaattctcagtgggcaatattttcagagaatccttcaacatcattcactctctcaattcctcatcttctgagcttctccatccataaaacaatcagaaatgtcttcctcttaataacatagctcttctggtattggggagtggtgggactagaaaagagtagaggtgtaagcaatgcaatatgagttcattcatgcaaataaaaatcacactccctggacagaatccctctttcccgcagatctatctcttctagagagtatggacagatggaagaagtgagggtatgcagagctggcgtatggcagtcccagaacagggtcactatcaaaaagcaaatgccaaccatgtgatatataggactgctgggaatgtagtccatcattgctctatggtaaaaaagaataccttctctaacatgacattctctgaaccacatatagacatacacacatacaaaaataatctctaatcatgaccatcagtttttgcctgactgtctcagcatcctgttagctacgttcctgccctccatcttattccctgtgaatccatcttttatactgatgacatggtaacacttttttttttatactttaagttttagggtacacgtgctcattgcgcaggttagttacatatgtatacatgtgccatgctggtgcgctgcacccactaactcgtcatctagcattaggtatatctcccaatgctatccctcccccctccccccaccctaccacagtccccagagtgtgatattccccttcctgtgtccatgtgatctcattgttcaattcccacctatgagtgagaatatgcggtgtttggttgtttgttcttgcgatagtttactgagaatgatgatttccaatttcatccatgtccctacaaaggacaggaactcatcatattttatggctgcatagtattccatggtgtatatgtgccacattttcttaatccagtctatcattgttggacatttgggttggttccaagtctttgctattgtgaataatgctgcaataaacatacgtgtgcatgtgtcttttatgatgtaaactgaaccatgtcaatgtcccaccgaatagctcccacctatgactgaaatcagtgagcacttcacaaagagttttggatggttggcaagaggtatagtaggaaaagtagtagtgtgcttaaatcacacagccatgatgacaggtctcacattaacttcctgatcgctaacctaaaaaagccctcaatgctgcctggctatctgactactttactttagacttttcattcccctattctcacagccaactgattcttgttgtttctcacctccaatttcttacacctgtcccatcctcattctcagcttaaaacttgctgtgaaaatagaagcaatcagaagagaacttcctctagcttctaccactagagattttcatgtacctgtatctaaactcatacacccctcttgtttctcttaatatggactaactgaacccttttctgggaaagacccattcttcacctgtgcacaagactacatcccctttcacctgctctaagctccagctctcctcttatttcccctacgttatcactgtttttaatcaatatataaaaacagcattatcttttaaccatcatcatcattatcatcatcaaaacctcacttttctcattttccctccagctactgtttcaaacttctcaaaagagtttctatggccactctcttcaattcctttactccaaattacttttgaacatgattcaatctggctttcacctttgtactcataaaaatggctctctttaaagtcatcaacaacttctcagtccagatcttacctaaccagtggcagcatttgataaggttgaaggatccctcctggaaacacgttctgaatttggtttccatgacattaaactgtattagttttcctatttcttcccttgtttttcttcctgtctcccttgctcttcctcctcaaccctataagctcttaatgaagcagtaccccagggactacatttagactttccagtttgtctgcactcacactctcactggttttacccagtctcatggctttatgattaacactgacagctcccaaaagtatagctcctcttaggacctctctcctgccctccagactcatacatccaattgcctgcttggcaactctgttgggtatctcaaacttgtcaggttcaaaacagagctcccgatatttcttactcccaaatatgctccttctttactctccccccatttcaggacaggtgaagtcttataattagtgaggtcaaaaatgttagtatcatgattgtcttttcttttctcatgcttcacatctgatctatgagccagttctgtcaggactaccttagtagttttcagcatattcagaatccaaccactttcaccatcaccattgcctctgtgctgctctgagccttgttcatctcaagcttaaattattgcaatatctttccaggtggtctccctggaaagtcacaaccttgtaatctcctctctacacaagggccacagtgatcctgtgcaaacgcaaattggatgatatcactcctctggtccaatcttctcatgtctttcagtctcagagtaaaagccacgatcttgcaaaaacctacaaggccttgcaaaatctgccccccgccccccatctcttgtgttttattttctttcctattgctctttcctccattcattctgttccagctctttgcacagttccaagcatcctgcggccttggggcattcacaaaattgcttgctctatcttatcattcccccaatcccttacccatcccatatattcatggtttttctctcacctttaaattttacccaaatgtcatcttctcagtgcaattttatttaattgcagctctccctgttggaccccttcttgctccacatttgcttgtctccattgcacttaccactgcctacttgactcttgtcttagctcagattgccataccgaaataccatagactgcatggcttaaacaacaggaatttatttctcatagttctggatgttgggaagatcatgatatggactgattcagttcacccttatgggctctattcctgacttacagtcagccttctttttgctacgttctaacatggcagagagagagaatgctctggcctctcttcctcttcttataaagatgttaatcccattatgggagtcccaacttcatgacctcatttaattacctaattaccatccaaagtccccacctccaagtaccattccattgcaaattagggcatttttactgcaaaatttctcagtaactttagagaatgtcatgtatgcatctcctgggggaggtctgggcagataaaattcccaatgtttcacacatacatttgaccactgggttgtcagggaatcttttgggatgtatcctttagacccctgctagtcatgatgtggtttgtggaccagtgcaggttcacaaattatttattgattgtctgcaataagagaaatacagaaacggagagtcaatatttagaaaacgctataacaaattgacaatgctgccaagaatagtcatatggtttggctctgtgtctgcacccaaatctcacctcaaattgtaattctgacatgtcaaatgaggggcctgctgggaggtgaatgaatcatggaggtggtctctaatggtttagcaccattgccctagtgctgtgtcctgagttctcatgagatctggctgtttaaaagtgttcagcattccctgtgtctcgctctctctccactgctccaccatgggaagatgtgccttgcttctccttcaccttctgccatgattgtaagtttcctgaggcctccccagccatgcaaactgtgagtcaattaaacccattttcttcttaaattacccagtctcgggtagttctttaaagcagtgcgaaaatggactaatacaaatatgaacagtagcttgtgaagtttttttttttcacacttcatttttctagtaattcatctttattgtgttttacaaaagtatcagttcatggcagatttaaagtaataagaagaaaaatctttcacttactgcagataatttgggaagcacctcctccaggcagattttaggaaatattggttaaattccaaaggtagaaaaaaatctcttgtaagtccagtctctagactttttcctaacattcccagctgcaccttgtatgccaactgagtcaacttgctcctctaagccctacgtgtgtccgggctgttcatctgcttgccatgtctttcctgcctcacatgcctgatgcacattttatccttcagaatttggttaagaggttaatggtgctagaaagagtccccagattcctctccataaacttgatgacctcactttacctccacgactttctggtaatcttatcctcaaatcagtgctccactgttgtttttgtttagattttatttttaattgacacaaaataattgttcatatttataaagtacaatgtttcaatatatgtatataatgcatgatgatcaaattagagtaattagaatatctatcacctcaatcacttatcatttctttgtggtaagaccattcaaaatcctttattctagctgttttgaaataaacaatacattcttattaactataatcaccctactgtgcaatagaacaccagatcttattccttctaagtaaccgtaactttctccccatgaaccattttctacccattccccttcccccatgtatttgtgtgttttcaccctgctgataaagatatacccaagactgggaaatttacaaaagaaaaaggtttaattggacttacagttcctcattgctggggaagcctcacaatcactgcggaaggcaagggggagcaagtcacgtcttacgtggatggcggcaggcaaagagcttctgcaggaaaactccctcttataataaccatcagatctcatgagacttactcactatcaccagagaagaatgggaaagacctgcccccatgattcaattacctcccacctggtccctcccacaacacacgggaattcaagataagattttggtgggtacacagccaaaccatatcatcaactactcttcccagcccatggtagccactattcaattctctacatcagtgagatcaacgactttagattctgcatatgagtgagattatgcagtatttgtctttctgtgttaggtttatttcagttaacataatgtcttccaggttcatttatattgtcacaaatgatataggattttattctttatggctaaatagtattccattgtgtgtgtgtgtgtgtgtgtgtgtgtgtgtgtgtgtgtgtatgtgtgtctatgtgtgtttgtataccatatatatgccacattttatttattcatttatttattcattttatttatccatttatttattcattttatttatccataaatgttaatgaacatttaggttgattccataacttgactattgtgaatagtgttgcaacaaacatgagagtgagacatctccttgacatactgatttcatttcctttggatatatatccagcagtgggattgctggatcataaggtagtcccagttttaattttttgagaaatctccatattgtttttcataatggctaaactaatttacattctcaccaacagtatttaagggtacccttttctccacatccttcccaacacttgttatcttttgtatttttgatagaagtcattctaactggagtaaggtaatacctcattgtgttttgatttgcatttccatgatgattagtgatgttaaatatttttttcatatacctctttgtcatttgaatgtctttttttgagaaatgtctagtcaggtctttcgcctatttttaaaccagattatttgtgtttttgtgattgagttgtttgagttctcttttctctccaacttcatacctcatccctgggcaaccattaatctagtttctgtctctatagatttctgtattctggacattcatataaatggaatcataaaagatgtggtcttttgtgtttggtttctttcacttagtataatatttttcaaggttcaacaatgttgtagcatgtattcgtactttattcctttttattgccagtgtttgctagtattttattgagaaattttgtgtctacatttataagagatactgctctctagttttcttttcttgtgctgtttttacctggttttggcataaggataatgctagctcctagaatgggtttggaaatattcctttgtcttctcttttttgaaagagtttgtaaagaattattactaattcttctttaaatgtttaatcgaattcaccagcaaagccatctggaattgggctttaagttgtgggaaatgttttcgtttgaaattaaatcattttacttgtaataagtttattcagattttctatttcactttgaatcaatggtggttgtttctggttgtctttctagaaatttgtcatgtcatctaagctacctaatttgttggcacacaaatgttcacagcattcctatatgatccttttttatttctgtaaggttggtagtgatgtctccactcccatttttgattttatcaacttataccttctttcctttcttcttcagtctagctaaaattttgtcaattttaatttttttcttaaagaaccaattagaattgattgattttttgtttttctatttcctattttatttatttctgttctaatatttactattttcttccttctgattgttttgcatttagtttgctcttctttttatagttttttaagttgtcaggttagattattgacttgagatgttattatatagacatttgtagttataaatttctctgtaagtactgtgtaagctacattctataatttttcgtatgttttatcttcattttcatttctctcatagcattttctaatctttctggcatttttcagaccattgattactcaagagtgtgttgcttaatttccacataattgtgaatttctaaatttccttctgttactgatttctcatttcattccactgtggttggagaccatactttgtataattttttaaaaatttattcagacttgttttatgccctagcatataatctatcctggggaatgttccatatgtacttgaaaagagtatatattctgctgtttttttctatcacgcctagttggtgtctatcacatctatttggtgtatactgttgttcaaagaaatagaggacttgagcaacgctatacaccagatagacctgacagacatttacacaatgttccataccaaagcagcagaaatacttgactagttgttcagaatttatttttaattttaataaatatatttcaatgcatccatctcacttactcatttctcataaaagtaatatgagtaacacccctctacgaccatggaaaaagtggctatttttgattcctctgattcaatagatcactgtagaacatgaagtcaccaaatattcttgtgtaagagctctctgaaaattaatcttgacaggattgttgggggattactggcacaggtgtagactgccaggctgtctctcctgctttgcacatagccttttttgagtataaatagaagaagaacattactgctttctgctatttcaggaaagaacacacccatttatttagtcattcataagcactgagttgaatgcctactgtaagacaagccctaagagtacttatagtaaacatacacttgattctactatgacataaaatccagaatctgatggccaatcctactgacagcagctaagagtaagaacttgacatgctcagcaggtacataagatatactttccagatcaatgctggattatgaatgctttctgtccacaggattctctacatgctcctttccttacctccatcaatttctgatgtgggcaagaaggattgttgtacccaataactgagtctacaaactcaactctcttcattatgtctagggcaatgcccagtgtcctaagaccaccagttgcaacctcctacaataaccccattacattggctaattttgttgatatatctgaatacatacatatctgactataaaacatgactctgaaacttactagatattggacattgacttgttcgcctaacttctccaagctttctcagtcttttaatttggagaccaggcatgaaaaatatttatttcacagaattgtagtgagggttaaatatttaagataaggtacctgacacatagtgggcactctccaagagtggtagcttaaaacatgcaaataacaattcttggctccttattctgtgctctggacttacatgtgagttctcagctaggagttaaggctcattctgaaactaagctagtgacctggtccttcatgtgctccagcacctgcaaacaacgtgtatactcttccctggagcaagaacaccaaagaagtgaggtggagtgcttccttcttttagtcctctagttgtcagctggaatactgactgctatgaatgaactgaccacctggtactatgcttctggtggtcattatcatccagcccttacaacacacaagttcactatgctctacccactacccctagagatcaggatcattgtcctcaggcctgtcctgcctagttcttttgcttcctccttttcccatttgttcagggtattaaaatcccaaaaccctgcaagactctgcccagtcaaattatgaacactaaacaccgaactccaaagtctaacccacaatgtttatagtatgctgtggatacatctgacttatattaagacacttcagggaacttatgtgactcaacactcaatgctgaccaagatggccccctaatctaggccagatggcaaactgatcattaacttcattctgatggacttgttttccccaaaatgagctgttataattaatcctctgttatctggcattttatcaacaaatatcattcattaactaacattttccctgccagttcaactacaattaattatcacaatgataagctgtggcactaagggattctgaaatcatctcaggattcagagagtgacagaaagagaataagagagagaatgagagacagcaagagagagaggtcaaatcatgctcagtagaattttaatattaagggtataaagcattgcttctgcagtgtcctggaaaccccatcccatttatacaaatgccccagataacgtctcctaatggggctgtcatgtaatatatagaaaatcaacatactttagagttggctgaatttcttcagcaagcatggcctcatccccaccctacaatcgcagtaccccatccctggcataggtcaagtccatagaggtgaagcaaatctatctaatcctggcagagacaatatatcactcagtatcattgtatttaccatcctacactttaaaagaaaacaaactccttaccctgatcctacagcttttcagaatgattaaaaatcttttctgaaatatgtcatggccagaatctcaatgaaaaaaatgtgacaaaccaaaaccaaaccaaaccaaaccaaaacaaacacacacacacacacacacacacacacacacacacacacacacaaaacagaacataataaaacaaactggatacaacaacttttcttctgggttttggaattaatttttacttcttaaggattgttaacttcagcaatgggatgagtgccccatttggtacatggtaggcattgaaggcattttggtttgtttgtataacaagagttaataaaaaaatgtaggtttcctgcagccaacttccaaaaatatataataaatatttgaatgatacgtgtttccaagttggaagcggtctgtttttctggatttgagtctgttgtaggagctacacgcagcctgcctcattgctcacaacactacaccacaactgtgtggttgacgctggaactgtggcaatggagccacttgagggctacggggttaggcagagtaaatgaaccggcctcaaaaccaaggccgtctccctctgcaaaaagataaaaggaaggaagcaacaaaaggtggatatcttcataaaaacattctcagatagagcatctcatgtaattcacagcagacacgccaagacatgataagattcttgttattgggattttaatgatcccagagtcctgctgcgtcagtgtcctgtcatatcagctctgtggcttttggaaaaaaagagcatggtgttttctgaaagtcggaaggccattgtgactcatttctgagactctctcccacttaggtatatcaaataggtatgctgctttgatcaggttaaatttttaaagcccaagggcactgaggatgtggccatgttaataatgcagagccgcaaaaactttaggaaatatcctgttatcccatcagtgtgggcagcaagccttgggtagcaccagcaaaccctgagagatcctgccagatggaaagctggcactgatgggaacaaattctgccccagaggatcttctttgagagtaacccttagggcaaatggatcactctgcaaaaagcttactggagaaatataggggtaggtaatcacatgtttgatttcttgcaatccaggttccaagctcaagaaaacctattcccagatataaagtcaaaaagagagaataaagccaaaaactaggatgaaggagaatgatcacatagttactaaaagaattaaaatgtacaaggaaagacaataaacatcagaaaggaagaagaagagaataaatgtgtgaaaaagacctgagatcaggcccttgattagcagggagaaaagaatctgaacaaggcaagtaagggaacccctactgcaaggtactgcctcggtaccggagcacagcaggcaagaaagactgctcgcaatctccaaagaaaacatttcagaacaagagaaaatgaggtaagttgtgctttcatcgcttgcattacgcggcggacccaagttcgcttgaatggtaaacgagcgatgatttgtaataaacggtttaggctgtggggttggctcttcagtcctaacacagtcccactctctggggacgagtcatactagtggccacatgccttataggatttggtgtcacccagagaaagagaaaaaaatctaagacaagcatctctcattgtcactattaataggaacttagagactgatttttggatcacttgctcttaaactgtattcagatgttgtgaaactggctggctgacaaatctaatcaaattaactccaccttaaagcaaaaccctgtttcgcttttttgctagcgcacttttttaattattcaagcaaaacagctttcttattcaatttgaaatctgtatttgtgcacaagtttgtctcacattgctcaacatcatctattaactgtttacacacagcagtgattctccaaaactatttttgatcttctaaacacatatttaaaacacatacaaacagaagaaaacactctgaaataaaatacactttattctattatattattatatacactattttatttatttatgttattattatttttctttgagacagggtctcactctgtctcccaggctgggatgaagtggtgcaatcgtgtctcactatagccttaacctcctaggctcaagtgctcctcccatctcagcctcccaagtagctgggactacaagcacgtgccaccatgcctggctattttcttcccccaccatattacccaggtttgtctcaaactcctgggctccagtgatctgccagccttggcctcccaacatgttaggattataggtatgagccaccgcacctggccaatatacattatttttatcataaccaatcctccctttttaaaatttcctctgagacttcttcccaagttaatcatcaattactacagagtaaattttttcaaggggaaaaaagtccttctatttcaaatatactatgaaataatatcttcatcttaaaaacatgattacaagcatcttttaaaatattatcctttcctttcaatgaaaacgttttgtacaaataacttgggaaacaaaaatgcttttcctggtcaagtagggatttttttcagacagctcctctgctgccctctaaagttcaagaaaaacataacagctctactttgcagacagcattttttttccactgaaataccaggattctctaaacttcaaagataattggactcattagtctctgctctcaatacagtgtggccaggcacgtctgctcaaagtgtacatgtgataataccgaaattaaaaaaaagcttaaagggcaggtgttgatggtatttttaatgccattgctactaaatgtgtccctatgattcatgtgttactacacaacataatcatgtaaatagccagaattttatgtttggaaaataatccataacttttgggatgttcataatttgtgttttgcgcttttctgttaactacgccacaattgtggccgaaatataataaaaatgaggacagtaggcataatattgggactgtctgctaagaaataatacataaagctatgactcagaaagtgatgtatgttgcttcctgaactcacccactttaatgacagagccagggccttgacatcgggacagattattagaacgtgaaggttggtactgccggttcagagaaaggaggcaagagattagcaaaaagcaggctgtataatgactagtctggagtggagaagggagggagattagctcctttctgttctttatgttagggacaaggcagagagcaaaagaagaaaagaggaaaggagaaagggaagaaaggaaagagagaagcaagaggcagggaagaaaatgcaatatagaatattcattgagcctcttctttgaactaagtactttaacttgttcacaataatcttgtaacatgctactctctgttctacagatgagaaaattgaacttcaggaaaaatagataatgtggtttagttgtacaggttgtgtacagtgcagccaagtgcagaaaggaaaggcaaatgcactagacattgcttcctctgcacttctctatgctttaaccaaataaccttctgagttccagctagggagctggcaggagagatgaagaagcatatgaaaaaataaagagaggcacacagtcacagacaagaaggaggattaagggtaattacaaccccaaagagcttgtggtgactcactaaaaagccacagggagaagcagttagttacaagagaattcttggccaaacgcccaattcaagggccagctgttgataatttaacaaaaaaaaaaaagtcctctttgaaaacctaaaatcattagagaagtacttttcacttcagctctgcatcagcagttagtttggatcagcagccaggatggggcattaatgctttaggtagagggggtctcaaaatatggctcttggatcagcagcatcagcatcttctagggattggtataaacataaattctcaatgctctccctacctccaggctcacaaaataggcatatctaggggtggggtctagaaatctctgttttaacaaggcttgcaggagattgtggtgcatgcttaaatttgagaactaggtttgtataagtcctttaatttgtttggcaagtactctctgtggcttttactatcaaggcaagtttgagaagttctgtttttaggaattgaggaaaaacttttgccctaggcccactgaaaaatgcttccttcctctggagaaagcgatagtaattcagattctcttccctcatttcagctgtggattcattgaaattagggcagtagagtactaattcccagagtcctaataaatttgacttcctacttctgggtggaggaacagaattgggagagttgcagaagctagggaattaagagaataataattagcaaattttatcggaatctttatctctgtatttcagttctagaaattgagtattttatatattttatcatgattatataaatggagctaaatgagtttcctgaaatttacattttatgcacagaaaacaggctctgccaatatttatatgttctagttcctatagattgtagagaaaggggaatgagacagtaaacaatgggcttaatttccttttcaacagggcttcataattcagtatcaatcttgtggaacagatattcccatttcacaggtgaggaaactgagtcttctctggctacctactcagctatgggcaagattcaaaaagaattcctccatccctggattttaaattcaaatgagaggacctatggtatccctttggggtcagaaaatacatcatactttattttatgtccctaataatatctggtaaaacatctgacaaaccatttaatcgatttctaaataaaaatattcttctttctttttattggttgcatttggagaaagaaaacaaatacttcatgaactgaaatgtatctgcatcttttcttggcatgaattcactttctactttgtatcatcacaaagatgacaatgtcccatgtggcagaggtgccttgaagttaaccagaaattcctgaagctttttccataatgtagagttgttgctgggaatggctgcccagtcagggactacattcctaggcatctttcctagggatctataacaaattcttgttaatggaatgagagtagacacaatgtgtgtcacatttagggtggagcagataagaagcaagcattacctccatttcccaatccactgagtgcagaggaccccgagatcgtaggagatggtagagcaaatagggggatagaacctggaatcctgaaccatgagagagaggaaagtctccagtccccccagagtgctcacaacatgagtgagaaaaccaatttcattatgttaattggctgaaatgtgtgtgtgggggggttaatattactacaactatcattaccttaatcagtgcatttcatttcttctcttagattatcatgttttatgttagatgatgaggtttttgagggtagtttccatgtttggaaaaatatggattatatagctgaatcaggagctgggtttttcactcatgagttttgaggaaactggtgttttttcttccccttggcttctcttcaaggagatactgattacaataagttgactatttgaaacgcagttcaggttatcggtaaaatctaggctatgcagtcagctagatctgtattcaatccttggtttttctctaattaaatgtatgaacatactcaaactgcccagtttttctcctcttctgcaaaatgagtgttaaaaatccctatattctaagattattatgaagatgagagttaatatttataaatgcctagtatagtgcctggctcatagctagcattagccactggtggtagacttctaaaaatatgtcctctacttttcaggagagaaatatactatgtcaaagccatcaggtttggtcatgtgatttaacttggtcaacaacgtgtaagcagaaaagatgtgtcacttgcaagttgaacctgatctctttctttctgacatgatgattggcaacgtttcgttagaaattgctccattatactggatatcgaaatgaagatgacttggagcaaagccacaattaccctacaatagggcaaatgttacttttgctgctgtaagacattaggatttggggaccatttgttactgcagcataacccaacttttctgaaaaatacataaaatatatatttctcagtcagggaatacggggaaatcctttaaactgtcaaattctctatcgggaactggggcatctagccctttccctgtccctcccaccttgcctcctaagaatgactaataataaaaacagcataggctttgtccttgctccccttcctggagaggctgtaaaactctacaaaatacagaaaatgaaatattttctgatggtaaaagagtttttttaaaaaatctgaagacagaatcagatctccatgctgtcctttgggagttcagattttagaaaaagaaattggagctttacatacatttaacatacatcatttaattagagtatatatcttcagtgagcacaagaaaactttagataagagtttcatactttgtagtgaagcaaagttagtattggagaagtcttgtggggagcaacacagaagactgagaattcttttttttttttttttaagacagagtcttactctgttgcctgggctgaagtgcagtggcgcagtcgtggcttactggaacttatgactcctgggttcaagcgattctcctgcctcagcctccccaagagctgagactacagacaggtgccactatgcctggctaatttttgtatttttagtagggatcaggttccaccatgttggccaggctgtcctcaaactcctgacctcagatgattcacccgcctcagcctcccaaagtgctgacattacaggcgtgagccaccactcccggcccaggcaacttaacagagctgaattcttaacagggctgagaatttttaacagggctgtggagtaacagaacttgatggaaaattggcatctgtgtagaatgattctaaagctttcagacaaatggcagaatcctagggtaaaaatatcacctttattttctttcatgaactctatcagtggaatatatttagctgaatttctacttaagagcaggcaagacgaaaaaaatgaaggccactgagaattgtgtcaattactctaacttttctgttattattattattgaaactgccacagtgcacctagcaatttgctgctctatggtcctattaatccagagtctgcagatgaaaaaagcaatgtttttatgctgactttactataatcacagtgaaacaaaaaacgatcaattcattgaactccaaatatgcctcaggttatgatcttactttatcggacattctttgtaacactgaagagatatttcaaaactataaattgtgaaagtctccctactctcccttccacagtggctaagacatcttaaaaagaaagcctttccccaaagcattatctatagtgatcatacctttctgcagaagctgtcccaggtcaggtaaggaaaaaggaaggggcagaacagaaaggagggagagacttcacatgaggaggaaacaagcacattaaaaataattaaaatcggccaggcgcggtggctcacgcctgtaatcccagcgctttgggatgccgaggtgggctgatcacaaggtcagcagtttgagaccagcctggccaacatggtgaaacccagtctctactaaaaataataaaaaaaaaattagccaggcatggtagcaggcgcctgtaatatcagctacttaggaggctgaggcaggacaatcgcttgaacctgggaggcggaggttgcagtgagccgagactgcaccactgcactccagcctggacaaaagaatgagactccatctcgaaaaacaaaaaaaaaagacgttaataaaataaattaattaattaaaataaaaataattataatcaatgctttgttctatgttgcctaccttatattctttacagtttttgttcatactctctcctaacatatttttattaggagtttaacaggccaatatattctttctaaaatactgttaaaagacacacaggagaatatatatatctctacttttatgtaaatcagctttaccattttctaagtgtttacacattagagttgcactttactcccaaaggtacactgagttgtatccagattgatgctaattatcatcttacagatgaaactggggcttagagaagatgtgacagaagtgaaagcggagcccagaccaccgtaccacagctcattccacatggaaatgcctttacctacctatgaactgatactcagagcctggcaacaactttcaaccctccactcaccgacttttccaaataaaagcaagttacgggtcaaaatgttgtcatttgacattaaccattatttaaccaatgtccctataatcaagagacacttagagcatatatttaatgttgatcacccttggcacactgttcaaagaccagttcaggatgatgaaaatcaagttctcattttcaggccttacaaaactatactctggaacagtcctcgaaatgcaaatttggctatatcgcagctacagagatgaaagctttgtgaaactctgatattctagttaaagactattcatatccatttctagagtgacttctgattttgacatataaaaatatgttcatatttttcacccattctggatgatgcaaaatctagctggtataaccatgttatttaatttttaatttccgcaaacctcactttaaaatgcataaaccattctatcatgaagagcacctttttttccaatgcgctgttattaaattcttattcctgcagtgccttctcacagactagttttctacaaaagaaaaaaataaactcattgcttttcatatgaagacccagggttctgccttctagattaattacatttgattcaaaggtggctctctgtaagtaaatatctctagctcagaagcaaaaggaagggttcacttcaggtgtttttatcttcgctcaagagtcaaaataccttctgcattttatataggtaaagctagaagaaaagtaatctatacttatacctatacttacctgtctatctatctatctattgagtttttcattatgctgctgaaactagcataagaaaatttgctatctctgctatgaattaaatgttgtccctcgaatatcatatgttgaagccgtaacctccaatgtgactaaatgtggagttagggcttttaggagacaagtaagtttaaattaggttataaagatggggccataatctcatagaactttggcctcataagaagaggaagatgtttctcccctaaggccccatgtgaggatttagtgaaaaggtggctgtctgcaagcaggatgagccctcaccagttggccagcaccttgatcttggacttacaccgtccagaactgtgagaatataaatttctgttatttgagccacctagcctgtggtatttctttacggcaacccaataaatccctattttaaatattaagactccaaatctcaaagacaagttaatatgagtctatgtgctaaacctagaaaacctcaaatctgagttgttaaccagacgctgtgatattcatgtttctttttgttaggcttcagcatcttcctttgggggccaaaataattgtgtgtgtcccttttcttaagtgaaatctgtccctaaaatgtagagcactgtcttctttgtgctccagggttttcttccttttctccttggctccgtccttgcttacctcctttaacaaatccaggcaggactctgtcctgggcactgtcctaggtgctgaagatgcaacagtgacccaaatatggtccctgaccttaaggagtgtcctaagagactgcttgttaccagcggtttctcgcttcaagaaggtttcctgaataaattttaaaaatcaatgtgtgttgttaaaagctcagtgttacagttctgatccatgggttgagttataatgaattagagttccacaatttatgttgaccatattcccaaagccaattattcttcagtttttctattcaggttttttcttttgcaaacaaccatcttggctaaactttatgcagctccctagggcaactttgcattgccaaggtatttctcaggattgtgcctgacagacaccgaagcttagtgtctgaagcaaacttaatgagctcattttatagtctctcctctaggtcttgataaaaatattaaacccaaggaccaagactgaatacctttgaatatcactgtcttttctggattctgaagttaaaaatagccagtttctcagtagaacaccctagtcaacagcatatcaattaatctgtgtattatgggggccacaactccacagcttactgataagcgtatcatgggggcaaaatcagtagccttgccatggacaaaggtgaatatatatataactaactttccttgactctccaaactttttcatttaagagagcaataaatgaagatgtgctacttgaaaaatcattatgctagttctcaccaggctccctcaaaatatttatgaatgggtgttataattaatttcttatgagtgcaccatgtacagaaggtgcctaattctctgcaaaagcaagtcccattggggacttattctcccagctccaagccagtctgaagcattccccaagtgtcagaataacagtagggtattttagccaaaggaacacaagcctggtggtattttcttgctgatttattataactttcattcaccttttattctcttatttttctcttattgaaacgttgttataaaacaaacccatgaacaaaaatctatcttcaatgtatctagcctgttagtgtcaacctctcaacatatcctcctacccttcaacaaatattctgttcttatttattggaataacctttgttcttctttttgtatattgcattttattttattttttaaaaaatctttacttctatttgatatgttttggacttttcctttcttaatctggttaatttcccaatgttgaaccatttcaaattaacactgaaagatacagaaccctaggctctttttactatttatttacatatttatttatttatttatgtgttatttcttaggtagcatttgtctcaatggagatttcatgtccccctttaacctaggacttgggccttttgaaatctaaaaattttccttagtgccttctaaagtcataatactacacattctatatcatgcaaaacccacaagtatctacaaggcagtaaggttctttttaatggggtgggggaaatagcaaacaaaacaaaactgcagcaatcaaatgtttagcattaagatgttttccaaattgttgaagaagtgctgaagaaaacgttttggcgctccccagatggcagccattctgactccaaatgttaccgttattttggccctcataggaagtactttccccgtaagaccttgattcagtgattgaccttggttttgataatgtctcattcccttttagattaggaaagtccaagagaaagcaagacggggaatgcactaatgataagcagtataaatttcggaataggtttctcatcttttctagtgtgattatagggtttctagattcaatctggatcccttatacagttctgatggagagcattttactagtatgttctttacaatttgatcatctggatggcaatatcatatacagaaaagagaattggatttcagagctaggtaacttgggttaaaattccaacattttcacttactttgctgttttctaattttaaaatgaagggtagacagtccttttattacttcatcatttccacaaatacatacagactataacatgccaatcacttttttcaggttcagtaggtgaactttaaggtctcttattatttctctgtataaactgttcagctagacctctgggcttatatgtaagcttccgtgattcaaagcaaaccaaaatgtgggccagcccagtatctgcagggcataagtctgccagaagacacctactatcaccaactccttgtactttagattgtctagtctcatcctgctgctgctcaaaaagaacaaaacataaagcaaaatggaaaatattttaaaataaggtataaaatgtaataaataatgaggaaagctaaaaacaatttatttagcactggccatttatttgcataactctgtgggaaagtgaataagtgatgtagtttttattctctaatagcaaagctcacatggaatgagatatgcatgctaaaggagtgtacacggcatgattaaggctataaagctgtatggtttaaggagagaggaccacatgaacaaagggtggcttcaagaagaaagatagtgcttaggccagtttacaagtactttataagcttgctctttacaacatgcacatacacacacatacaggtaatctcaacatcattgtcatacaaaacaaaaatcaggtaaaataaaaaagcattaaatgggtggcaattatttcacagtgaaacatagtttcacacgtattcttaggaaaaaaaacattgaaaataaaccaaatcttcaaattaatagcagagaaaatatgcacaaaataaataaaatttttaaggatagatacaaactagtaaaatatacaataaaactcagaaaagttcaacaatttaaaaagccagttatttgaaattatcaataacaaaaatgaatagttttaggcacgagaatcatttaagaagtgagaatattaggaatgagaaaccaagataaataatattaggaatatgattgtatgttaaaacttagaaagacacaaaagagattttattatttttataataatatataaatttaacagtttaaatttgaaagcagatgaatttcataggaaaatttaaattaatcacattgactaagaagtttagaaaacctacataaatactgtataagaaattttaaaactggtcataaattcataacctattgcatcctaaaaagtcaaataaaattgttttatgataaaatgaaaccaaatttccaaaaactagctattccttacattattgaacaaacagaaagatgaacagattcccaattcatgtaattgtacaaactaatcctaactttgatactataaaacaaacaaataaaacagacaagactagttagaacaacaataacaaagtgaaaacacgaatcttttgtcaatagacaaacagaacaaattatactgggcttataaggaatctccttaacttgataaagagtaattaagagaaccttatcaaaacatcatactttataatgatgattcatgagaagcagtcagtttcactaatatgacaagaatactcacttgcatcaagcaaagcaaacataaaatttagaaacaatgagacagttgaataaagtggtaaggcacaaaataatcattgagaatctataactttgtatacctcagcaatagccatacagaaaatataccaaatattcagtttataataatggcaaaatctataaaacacatagaatatgtctagttaaaattattaaagactcatatgtagaaactgtaaaacataaatggagaacataaaagaaaacctaaataaatgaaaatacataaatattcctggtgcaggatattcaatattgtagagatgtgacttagttcttcatccaaaaaatttataaatatttaacagtgccaaacaaaatcccaaaggatgttcttttattgcacacagcatggccacttaaaacagggtgatagaataaaggcaggagaaaagcaaaagaaattaaacagaaatatgaaaggagaccagtactgccagatatcaaaaccatagttaggcactgatataggtgtagataattcaatcactggaacaggctagagagttcctaaataacacaacggttatctggaaagttgaaattagtataggaagtagaaactactcaataagtgtcccaagaaaaactggctattcaaatgaaatttaaaaacaaatcctgcagtgagttcaagggttttgggggactaaccaaggaaaaagatatgaccacaaggtagtaatagaacacaataaggtctatttgagcagtgctttgacaggtttacaggaaaaggtgagtccctcacaacatgagaactttcagaggcaatgctgcaggaatcactgtccaaaacagaaaggaaggaaaggggacgcctggagaagacccttccaggaccagagagggggcttaactaaatacatgaaggtggggacgctctgggtcagagaattctgaagggtcatagtggcttgggatctctcatagccctggagtttatcttatccatgtctaacagatgtttggtgcagtttcgtgtgatatgcaaaacaagcagctctaaatggctaaaaatgtgcttaatggggttatgtttaaaacaattgaatgtgttaaaaatttgagcttggcactggtgggcttctggactaatggattccagcctactgcgaagaagggaaaaacacacggcaggtccactatacggggccacttgtggctcattgaaataacaaagccttacctcacttttctttgcatgcctatctgcttatgcacacatctcagatgtattagaggtaaacatgaaaaaataatgtgagaaatgtaggaaattacatttataatattagggtgataaaggctaaatctaaaagtcacacatttatgaaataaaaggtctcccattattattgtgtgggagtctaagtctctttgtaggtctctaaggacttgctttatgaatctgggtgctcctgtattgggtgcatatatatttaggatagttagctcttcttgtcgaattgatccctttaccattatgtaatggccttctttgtctcttttgatctttgttggtttaaagtctgttttatcagagactaggattgcaacccctgccttttttttgttttccatttgcttggtagatcttcctccatccctttattttgagcctacgtgtgtctctgcacgtgagatgggtttcctgaatatagcacactgatgagtcttgactctttatccaatttgccagtctgtgtcttttaattggagcatttagcccatttacatttaaggttaatattgttatgtgtgaatttgatcctgtcattatgatattagcaggttattttgctcgttagttgatgcagtttcttcctagccttgatggtctttacaatttggcatgtttttgcagtgcctggtaccggttgttcctttccatgtttagtgcttccttcaggagctcttgtagggcaggcctggtggtgacaaactctctcagcatttgcttgtctgtaaagtattttatttctccttcacttatgaagtttagtttggctgcatatgaaattctggggtgaaaatccttttctttaagaatgttgaatattggcccccactctcttctggcttgtagagtttctgctgagagatcagctgttagtctgatgggcttccctttgtgggtaacccgacctttctctctggctacccttaacattttttccttcatttcaactttggtgaatctgacaattatgtgtcttggagttgctcttctcgaggagtatctttgtggcatcctctatatttcctgaatttgaatgttggcctgacttgctagatataatgtggcacatatacgccatagaatactatgcagccataaaaaatgatgagttcatgtcctttgtagggacatggatgaagctggaaaccatcattctcagcaaagtatagcaaggacaaaaaaacaaacaccgcataggtgggaattgaacaatgagaacacttggacacaggaaggggaacatcacacactggggcctgttgtggggtgggggaggggggagggatagcattaggagatatacctaatgtaaatgatgagttaatgggtgcagcacaccaacatggcacatgtatacatatgtaacaaacctgcatgttgtgcacatgtaccctacaacttaaagtataatttaaatatatatatatataaagaaataaaaggttgaacttgatgacataaaatgtttaaaattcttcatcaaattaataataagaactgacgtttgttaatatggtttggatctgtgttcccacctaaaactcaggttgaaatgtagtccctgatgctacaggtggggcctggtgggaggtgattgaatcatggggggagtttccaacgatttagtaccatccctctagtcctgttctcacgatagagttctcatgagatctggttgtttaaaagtgtgtgggccgggcgtggtggtgcacgcctgtaatcccagcactttgggaggctgaagcaagcagatcatgaggtcagaagatagagatcattctggctaatatggtgaaaccccatctctactaaaaataaaaaaaaattagccaggtgtggtggcacgcacctgtaatcccagctacttgggaggctgaggcaggagaatcccttgaacctgggaggtggaggttgcagtgagccgagatcatgccactgcactccagcctgggcgaaagagacagactccatctcaaaaataaaaataaaaataaaaataaaaataaaaataaaaatgtgtgtggtacctcccctgtctctctcttcctcctgtgctggccatgtaagatgtgcctgcttcctctcaatcttccaccatgattgaaagtttcctgaggcctcccaggaagctgagtagatgccagcatcatgcttcctgtacagcctgcagaaccatgagccaattaaaccttttttttttttatagattacccagttgcaggtatttctttgtagcagcgtgataatggactaataaatttggatagcatttataataatgcttatgtatattgaatcatgtaattttcactatgatttatgagaaaggggctgggtgtggtggctcacgcctgtaatcccagcactttgggaggctgaggtgggcagatcgcctgaggtcaggagttcaagaccagcttgactaacatggtgaaaccccacctctagtacaaatacaaaaattagccaggtgtggtggcatgcacctgcaatcccagctactcaggaggctgaggcaggagaatcgattgaacctgggaggtggaggttgcagtgaggcgagatcacgccattgcactccagcctgggtgacaagagcgaaactccgtcacaataaaaaaaaaattaaaagataggtagttattctcatttgactgttaattacataactcattaaatgtatcaccacgactaaaataatatgcagaagtgtcatataatgttgtgcaggttataggcatacactgtgcaacctgacatctgtgagtaggggttgagggttgtttggtcgggggtcattcccgcagcctttgatgctacagaaatgccctcactcatctacctcattgtttatatgtttagcattcaagaaaatccaagggccactttctctagaaagtctgtcctggcccaacttggcacatacaacaaggtaaaactgacctctttcttctccaatggcccattgttctttccacaaactactctcacaggaactttaacattttgtcttgcttatttatttactcatctgactccttcaccagattgcaggctacttgagggcaggaactcttcttatttgtctttgcataaatgtttcccagcataggtcacacacatagtgttgaataatttttcgttgaataaataccaaggtccagagagatattctactgaatggcaatttgcaagatattgattttctttgctcccatttggtgatattgttaaacttttactggagggcaaaattcatagttgtcgcttcacatgtgaattagcaaggaggcaatctcagctctaaaatctttacacttatcctaacacccccatcagctcacactattaaacattatagataaatactgcaacattaagttttgtggcagtgcaaataaaagcagtaacaagttatgtaattataccactcttttttaaaaaaattattaaatgctaacacttctccaattataaccattcaattactactcactgcctaatgtccaaaattcttaacatgtcctagaatggtctctaaaacctggctcttgtctatgtctctaaatttatctcctgctagcccctcctactccccactcccatccatgccacagcatacatgtgccctatattcagataacattttgcaaattgaaattgcaagttgcaattgccctaatccaatctcaactctttaaatcatctcacaattttacgctctggcatattctgccacttcagctcagaatacccttttcacttttgtagcacttcaagctgtcattcataattcaagtctcagcttaaaagccacatcatatcctcaatgaaacctcctcgcccagccctagcagaatcatgggatccttgctgaaaacttctagggttcaaggtgcacaacttgtatccacagtgtttaacacaatattgtatttgtcattgtttatcacatttctcatctatcttccacctttttgaaagcaaggattgagtttggcttattcctgaatccctaatgtctaacgaacgaccgtcataaagtagccacttcaccaaggagggatgaagcagcaaacaggaaagcctggttcaggcccatctttaatcactagttttgtgaaaaagttcactgctgcttcccacagcctgggatttggttttgacatgattatttttcttttgcagcataggaaggaagctcatgagaagaattttagaaaaatcaacctcgatttttcccatggctgtgcctcacctagcagactatctcaggacagcttcctggaaacacagcagcagaaagtaagctgcatttatttacttttttaaaaatgtgttctgatactttttgattattacaaagaatcttgctgggtgatactgcagtggactgacctgatatatgtttccttcttttttcagtgaattgttcagttcttttttggaatactgtgggtgagagcttcaggcagcacagagccttagaagtatgctttgggcttggattgggacacggatttagtaattccacaactcaaaagcaacttctgagataaaagctgaatttgtaaatatgtgagataccctgaacctagaagatgagatataagtaatgtagtttaggtggttttggtgtattatctatctccaaaatcaaaggaaatggaaggattcctctaagaatcatcagtaaaaatgtgagttttgctcatatttgcattttgcctaattctaaccctccataatttattgactgaaagctaaagaatattaagagaaaatgacaaaggtaattttccttccactgtgtcatttcctatcaactatgcgatttctttattttttaagttttgaaaaattttagaatagttttatgtttctataaaaattgctaagatagtacagatttcccatatatgctgtatgcagtatcccttcttgttaacattttatattgctatggcaccttggttacaatattgacacatatttattacctattttgagatggagttttgctctgtcacccaggctgtagtgcagaggtgtgatctcggctcactgcaacctccatctcctgggctcaagtgatcctcggtctcctgagtagctgggactacaggtgtgcatcatcacacctggctaattttttttttatttttggtagatacagggtttcaccatattgcccaagctggtcttgaactcctgagctcaagtgatcctcccacatcggcctcccaaagtgctgggattacaggtgtgagcctctgtgtccagccccatgttttatttatatttattaactttttctcttaatcccttttctgttccaggatcccatccaagataccacattgcatttagttgtcatgtctccttaagctcttcttggctgttagctttctcagactttttttgttttttgagacctcattcgttttgaggagtaaaggtcaggcatcttgtataatgtcctttagttggcatttgtcatatatttttctcatgattagaatacgctcgtatgtttttgggaagatgaatgcagaagaaaagtaccatttacatcccatcatgtcaaggacacatcttatcaacatgacttcactgttgatgttgaccttgacttcctgtctggggtagtgtttgccatgctactccactgtaaagtcattcttttttatcctccctttccatagtgctccctgtggaaggaagtccctatgtgcagtccacatttaaggaatggggagcaatgttccatctctgtgaggttaggaaatccacattatcagaaagtctgcaaaatcagatacctacagaaattattcggaattcttctgcatagagacttatctattcttcccaatttatttattccataatttgtttcaatatagacttggatttttaatatattgggttgtaatacaataccacatagcttattttattgtgcaaattatcccacctttggtagttaggagctcgttcacttggctcctctgtccttttggcatcattgtagattttttaactctttatttatttatttaacacttccttactttttggtactatataatgattcatgttcaacttgcttatgttctgccctagttctagaatcaaccatttctccaaggagtcctggttccttttattgaaaaattgtattagaaaccaaaatctgtgcactagatatgttcattgctactgtggtattcttgcttctaggccctcttaattgacatagaaggagaatatatgtctgcatactaacccatctatatgtatttacctatatctatagatatttctatatgtacttatctgtaccgttattaagcaaaacatgaattcatactgatatatctgactctaatccattaccacacagatcattctaaacttatccctttgcttatccataacctcccactccaactgtgagaaatatggctcccatattcaccatccatttatttaattgttcgattccagtatacatctatagcagcaacagaattattaactgtgtccccatgaacaagaactcaattaattttaaaactaccatttttaaattatttccaaactttttatttctaactttgaattttcttaagcctgggagaaattttgtaggaaaaagaggaataaatgccaagacaaatgaaatgtcacaaaattaaagaatatgcatatggctaaaaaaaacctctatattaagccaggtagaaattcagtaagcctgataaagaacatggaagaagatatttacatttaggatatttagattagtaagctataatagaaaaataaaaccaatacgtcacaatcacatgggaagtaggaattaagatacacacaaaaagcatcagtgttggcaggtgggtaaatgaatccacaccagagacacagattccagaaagcagagaaaagtaaaattcctaatgattaatcaaactgtcagaggccaagagatctactgaaaataagaaagggttgaagggttgagatatcagtatccagatatccaagccaaggaaaaatttgatggtattcaggcacagggtcttgtcagcacttcacctcagggattttacagggtcctttgaggaaatgtctaagcatgtatgaattaaggcttataagaaaataatttaagaggatttagctaaaattaagcattgaagaatgttttttacgatgcaacacaaagctgtctccctcaagaagccttctgagatagccttttagacacagcacaatagaatgttcatatgatagttttcatcaaatattatttgcatatgtttgtgagctagagtgaggtctagaggatcaaggactgtaacttagttccttttgatcatcagcacctagcactgtgcttggcaatgagtgataactcagtacttttgtatcgagtaaaagaaagaaagaaaaagagagaatcccagccacataaacactcagtttatgaacatagagttgaaaaaaaaaaaaaaaaactccttccagcactaaatcaatacccttccaattgaataggaagtagggccttgccatgttgagttctccaatgacttttcaaaaaacctttattgctgcaatcataggtaattcagtgactgtttaaaacctatgatgaaaataaattacctgagttcttttcattaatcttattattctgtagtcccatcataaatagctcactagcatcttttatctttatttttcagagtggtacagctaagaaattatatcattatgcatttgtgttgtgttctaatttctgcctgatgcatcaataatacatttaattgtgttattcttttctgcagacagttccatctttggaaattgctttagtgatacaaaggactggagggtagatattctgggtttgtcctctaattaaaatatgtcactggttagactcagaatacagacaattttttatcactgggagtctttaatcccaaactgttcatagaatgagcttatataaacactgagatttgacacattcttccagacttgatgaaaaaaaatatgatatcccaaagttcttgatttgaagaaaaagtgaactttgataactttggtgagattttcaatttcttggccaactacaatttatttctgagcagttaatttactttttgcataatgctacagaagaattttgagaacaaaggatatgtggaaagcgctctttttattttttgctttgaatgatactcataatattatgcagataatcactgaagttataaattttatgcatttaataatttttatacatttaataattttaacagataattttgaagtctattcattttcataaacttataggttgggaacattgggaaagtcgtttagttccttgggcttctgccaacttatgtgtaaaaatgggctaacattaattcaactacttttcttatttgaaaaaagacatacctgaatagaagcacttgaatttgataagggagaaatcacctagtgtgacatatttacttactttcatggagcacataaatctctgttcctttccttctcacaaccccattgcatcctcgaccccaagaaacccacacattaaagcttttctctcttaacaagagacttctaaaaatacttccaaggtagtaaggctgaaggaaaaacaacaacaaacaaccaccaacaaaaacacattacatatgtaatttaggaatcattagaaatatgaactcatttaggaaataagatttctaacaactgaatcaaatccatttaacaagtcattctgtaaaaccacaaaaagcccagaagtgcacactattcatttaatatctgaaaaaactctttgtaacaaaaggtttttacttaacccaaaacatttctttagccttggacaggaattaaggcttagtacagcttgatgcaaatgaaaggaactggcatttatcatgagtttcccatgaagctttacagatgcatagaggatgcaggaaaagtagagagtatgttagtgtgtgtctgagtgggtggccaagttgcttaacttggaatttaaggaatgtcctctttgaggaggtaataagtggagacctcaggttctatgggaagattactcaaagcataaagaacagcaggtgcaaagatctggaaatggaacagaaaatctccacatcactccccaatttaaagtaaaatgtggcttatactattttttttaaatgcatgattataggaacgacagtttgcatacaggtagaatatgccagatgtgacagagattggccagctagtgaccaatctcctttgttctccctcctgagaacatgtcaagacaatacatcacaggtacccttgcagcaggtatggtttcgtgaataaataaatgatgaccagtggactctggtggaagtttctggcccatgaaaacttccagggatgatccttcatgggttttttgcctttgccaacaactttgaaaggcatgtgtggaagactgcagagcccaagatgaaagagaactgggtctctgaaatgccacttgttttttgtttgtttgagacaagatctctctgttgcccaggctggagtgcaatggtgtgatcatagttcactgcagccttggtcttctgggttcaagtgatccttctgcctcagcctctcaagtagctggaactacaagtgtgtgctaccatgctgggcaaattttttttatttttattaaagaggtctggctatgttgcccaggctggtctcaaaatcctgggctcaagcaatcctcctgccttggcctcctaaagtgctgtgattacaggcataagccaccacacctggcctgaaatgacattggaaatagagctgtatgcttaccagaaacacttttgttctgacaaacatctacattttaaggtttgtttgttttatcagtgttggcctcaactaatgtgataagaatcattttctataggtttgggtgctgttctaaataacataatcataattaagctaccagcaatttaacaatgaaaaacccaggggaatatcttagatgcagagcaataacttattaaatgaaaagaataaagctgatgtatgttgggacagtcacagactcattggataaaatttcatgttttccaattccctggcacaggatcttagaagtggccattttacctccaaagatagattctctactgtatccaactaattgtgatgttaaacgtgagtatctgagagaaggtttgttttatagtggaaatccatggagttggccatattaacaaaaaggactgaattgtaaatatcagtaaataaagaatatctattgatacaagtcattttactaactcattcctcaagaatttccttgagcagatatacatatacttttttgttttgagacagagtctcactctgctgcccaagttggagtgcagtggcatgataatagcttactacagtcttgaactccgggactcaagtgatccactcacctcagcctccccagtagctaggactacagacatgtatcaccatgcttaattttttattttattttattttttggagacatagggcctctcttttttgcccaggctgctctcgaactcctggcctcaagtgatcctcctgccctggcatcccaaagtgctgggattacaggcatgagccatggcactcagcccacatatcattattggttatgcattattggctgttttgccaagattttgttttgttagttcacagtgttgagtgaatatatgtgtgactagttgattgaatggtcttaacttcttgaggcataacagaaaaacaattattttcctaactgctacctttaaaattctttgaagcgtatttcttccccaactctggataatctcttgtgcaaatcccaaactataaagccaattatattttaggaaagagtctcattttagtatctatgtcacaatttcctatattgcatgaagccatgaaatacagtctaataaacatttcattctctaatgcaaatgtctcccctgcagtttccattcaggcctattccagacttgtagagccacagtggagtagagaaaaccactctttactcttctctccttttgcttctttatcccacttgctctgctgcttcagattcttccaaaatctgggcaggagaggagcttatgagagaaacagcaggcaatagggtttttgttatgtggcacaccttatagctttctcgtctttggatttccctttaggtcaggaatccaaatgctggctctctcttgggatataaatggagtccccatggggccatctgtagtgcattcttctctgacatgtgttgtacatttccgggctgacctctagtaacagctcgtgcacctgttgtcaattcaatttaccccacagcctctaaacactggggcttctttgcctggtagatagccctcttagctgaagtgccattaggtgtgttgtgattatcttttaagacatccgctagaccaatgggaaatacatacatccaagctgcatcaagtgcaaggaacttcagctactgcattccctctctatcctgctccccatcacaagaagctctagacagacatccatcttcggaattctctagaaaaaaagcatgaccagtctatgcttacatgcatttgtaccacataaactcctacaaacatttttaaggctctcctcaaattgtgtctttacattccattctaatacactggattagcctttgagtttctgctgcttggaaagtttctggacaagcaacaagagtcctttctctccatctagcagacaacttggtatctttgagaagacctcttgaaaagcacttctttcacatgaacggagcacaactttccaatctacagagggcaggagaaaggccaagggtctgcctcagtagatctaagactccctaccataataagaaattccattccacaaagacatttggcttctctttaatagggtgaatgggagttcaaatatcacttaggcaacctcaagctctagggggattgtctggtggctcaagcactattatctggggctagagcccaaatataaagataatagagaaggtttcattttccatcctattacagttttaaagcaaatatttattatgagctctgtatgaagaattttataatcatcatctcctttaatcctcataacaattttatgtggtagagaggatgagtccccaatttcaggtttaatcacatggcaactcagcaaattggtccaggtcatcaaacaccttgtcagtcagcacactaggaatctgacccagagctgagtaatgtcattcttttaactgtctcaatgttagaagatttatgagaagacaaatattataaaatcacatttaatcagcatgagtgttagtgttggctatataaatccaagataattaactcaaaactttttagatgttataaggattgacttagaaaatttaaaatttataattttctaaataccaatgacagccaaatggaaaatctaatgggaaaaaaaaagatctaatgcaagactgcaccaccaataacattaataacaaaatttacattatttagaaatagccttaactagaaatctgaaagtttatataaaaatccctattaaggtgctgagtgcggtggcttatgcctgtaatcctagcactttgggaggctgaggtgggcggaccatgaggtcaggagttcgagaccagcttggccaacatagtgaaaccctgtctgtactaaaaatacaaaaattagcctggcatggtggtgcatgcctgtagtcccagttactcaggagtctgaggcaagagaatcgcttgaacctgggaggtggaggttgcggtgagccaagatcgcgccactacacatactccagcttgggcaacagagtcagactgtgtaaaaaaaaaaaaaaaaaattagtaaaatatacaataattatccaagagatatgttatagatttatttgaaaagtctgaatatgtcaaaattactaagtctgttaaaattaatttataattaatcacaattcaaaattaaaatatcccagtggaatatagttgtgaatctgacataatatacttcctggaagtacaggtgagcaggtgagagaaaaaaagataaccaaagaaatacattaacaaaagacagtacagcaagttgtaaatattcaatctatatatttttaaaagcatcatgtgtttgctggtcatcagtttattgactctgaactccatatccatccttctttgctgctctgtgaaaatggagctggtacctttcactattcgttctttgttggctggctggatgttaggatgttgggtttggtcagtaaagggtgctagagaggaactgcaggaggaaagggttttacttctctgttctggtattcttgcttgtttgacaaaactccacagtgcacctgatttttctagcactattcctgcagtgcagaacagctagcagattcctggaccaccccactttgacagttttgagtcaagtgcctctgagataccttctcatgagctactttccctaaaatcactgctctgctctctccaatctttgtgagaattggaggagggcaggagtctggatcaaacaaggatatggaaacaaccttattatcattaatgatccgatgatgataaaagataaagaggtttaggattttgtggtatgatgaccacagtgattgttaaacacttacctttttttttttctgttacagattgggttcctacacaattcagaactcaacacaccctttgcacttccttcctgtacagacatgttattatccacgagttccagttttgttacccctggaggctgcttaaacaagtagacctaatgcattctctatttcttccacaagagaaaatgtgagctacacagagtaagacagagtcagagaaaagagaaagaattattcaatcaaaatatcatttcagtactgctaagtccttgattagaatttctcaagtggggtctgttgattgtcagcatcagaagtaactggaagtaccaggtaaataactctagctcacctcctaagattctcattccagaagtttgtgggtggggccctgcaatctgcataatttgagccttcagctgattttgatgcagatggtccaagagctactctttgagaaccaattctgagataaatgaatgttttagaaatattaaaacagatttcaagacatcactaaattgaacaagcaagaaaagatgtcttttatatcaacacatcatccaaaagctttggattccattccaaatggcagtttatgcctgtatcaggagctaaggtgattgagagtgagactacaggtaattagagaaagaaagaagagaaaacctgagtgctagagctagggctaatgtatattgctgagagtcaacaaagaaaaaaaatagaacaagtcagtggcttgtaataagactgaatcaacagcttcctgtccttattgcaggatctagtgggacagctcagcttggggacacagaatcagaaagtcaggcctctcaagtcctaacagcaataaagagtttagcccaattctaatgacagggtagatatctggtaatctccacactggtgctgtcatcttgatcttggtttggctttcatcagctcttgactgatccaacgtgactagtctccctgcctccaagctcaatccacttcaatcgtttctctcccataatatttcagtagcctcccattgcctacctacagcaggggtccccaaccttggggctgtggactggtaccagtccatggcctgttaggaaccggctgcacagccagaggtgagcgactggtgagcaggcattactgcctgagctccacctcctgtcagatctgggtggcattagattctcacaggagtgtgaaccctgttgtgagctgcacatgcgagggatctaggctgcattctccttataagaatctaatgcctgatgatctgagatggaacagtttcatccccaaaccatccccgccctgctctgtctgtgcaaaaattgtctttcacgaaactggtccctagtgccaaaaaagttggggactgctggcttacaggataaagtccagtttctctctaaggggcatgtggagggggtcacctctcctctatctaaagtagattagttggatttcaatccattttttatactgacaactgtgtgatgttaggcaaatgatctaacttccctggctgaagttttctcatctgtaaaacatagacatgagactcaatgggacactattcacatgaactatgatgtaaagagcatcctctggaggagggcaatgaagcagcctgaaaatacacacttcacatgattgccaggaagattgatatagtgcacacaaagtctatatgatagtgcttggcacacactcagtcttcagtaagggttgacttggatcattattgcccctctgttatttcttacatacccttgctttccattcttaccaagtaactcatgatttttcaaatgatgctgtttgatacctcacactttagctccactgttttttcagtgcaaatgccctcccctcttcacatgatgaactcctactcatcccttaagtcctagctcagatgtctaatctctgtggcactccctgattccaccccaaacagtttttaaacctgtattttcattaaagctatataaagtccacacctccattattacaataaatcctctccacagtaataagcctttcatgttgacagtcttctacaggaagagtatgtctcaaactgtgccattagttataccaccttcaaaacggatgccatatccttctaaaattttactgtaatctacttaatccttttctgtaaatcaattcataattctacttatataaatttattttaaatgaaactttatataattcataaaaaattaatgcatagttattctaaagtaaataataattacaatacaataaaaacgtcatatccatctactaactcatccattagcagcactcttatgggaaaatctgtactgatatataaaagctctttcagtgcaaagatatctgtctttatatccccagtacctattataatgttggtacagagcaacatcttgacaatttgaattgccatactccttcagaaagccctggcttcaaatcttgactttaacaaggagaaattaatttacagatatttataaatttaaaatctactattagaatgagattttgcagaaaataaaattcacccgaatattgtttatctatggaaacaagattctcaaatctgcaactgagcatatagaaaactaatacgaaagaatatcctttgaattaactgagaaaaaattttcgttacccaccaagaaacttttttcttttggttatttagaactatgacattcttcttggccaatagttacatcagagttaaatatgtgcctcacaacagctgaaagcctgtggtgtttgtacactctttctgctagtgttgacttcacttttgagttttctcttgtccatttggggggttatgttttactattaaaacttttaaaaagtcatttatctaatatttttattgagccagagaaataactaattcattaattaaataagcaacccaataaatcaatggatgaacagattgatggataaatacacaaggtcatgagcagtccttagatatgctaatgcaattgaccagctcagctgggggaaaatgagtaaacagacaaaccttttgtgacatgtaaattaaaaagcaccttgatggacatatttttttcacttcttagtctcttgttacaacaacttgaaggcacagcctgttgacaccaaaaccagttcagtttagcaacttgggacatagactgtaagaaataacaactgtgcagatgagaaacaatagaggtgggtgttggatctgctaagaaagtgaaccacatatctttctctccgtgaagcacaagacatatgaaaagaaaaaacaaacaaacaaaaaaacccactaactctgatgcagaagcaaacagatactacaattgtgctggcaaatggtaaactcacagccaggaaaggggcaactgattttctttgctatttatgtactaaaatcactggtcccattgggaactagcttacttaaaaggctacataggctgggtgcagtggcttatgcatgtaatcccaacactttgggaggctgaggtgggcagatcacgaggtcagaagttcgagacaagcctgaccaacatggtgaaaccccatctctactaaaaatacaaaaattagtcaggcgtggtggcatgcgcctgtaatcccagctactcaggaggctgaggcagaagaatcatttgaacccaggagacggaggttgcagtgagccaacatcatgtcactgcactccagtctgggtgacagagtaagactccatctcaaaaaaaaaaaaaaaacaactacataatattataattttatttattaaaatcgcttccacgttttttatttcaaagcttgaacaatactacatatgcattgattacaattcaaacttaatggaattctgtggtagcataaatgctgatttgtttttaaatgatagcataaatgctgatttgttttaagtataaaacaaatcactcagaaaaaaactggaataaaatactttcttcttctccaacagaaatctcataattatatctatttggaaaatatatgaaacataaatttacatgaagtagaaaataatttggatgtcatgtaagaagtcttatatattttagtatatagaaggattctataagcatatgaacactatgatgaaaaaatttctttttcagaaagcttatttaaaaccaacaattacacagtcactttgaaatagcacattataattttgcatagacactttgatttcagagttaataaatgtaaccaatacttcaaaaagctgacttattttccaagtaatatatccaactgtttatgcacattttattaccatctttctctcacacacttacatataaaagagaatgaatattcacaaatcagaatttatcctaaaaattttagaaaatgaagcatccaggaacacagactaaaaatctgcaagtagaatttacaacttcctaaaattaatttgagataatcaaaaattcaagttcacatacaaagtcagtgttattgaaatccttttatgaagcccaacatgtaggaagcaagcaaaaaggctacacaactgcaatagcaaataaaatcaactaaagttatttaagcattaaattcctacaatactagcgtttcgaaaaagcgttgtctttttattcatctcgaaaatgcatgtttttttgaagccatcatggaaaccaagagacaatttcacttaacttttaacgtttatcaccttaaaactgggtttttataggtgagagaactgatttgggagtcaaatggcctgggtcttagtttctgaaatttactactcattagcttatttgacctttagcaacttcatcataaaaaacttctctgagtcttaattgctttttctacaaaacattaacaagtatctttgccaccagaaggattaaattagacaaagtatatagagcagatatggattccaatcacgattttttagttatgaaaaagtacatgtaagtaaaagtcattgcgttattagagattgataagttcattacagtagaaaacttgtttaaatgtatgcaaaataaacctaggaaatgaagggtacattagtgttttctgttttttaatttcaaactcaacagtaaaagtactgtcataaattctatgtaaaacacatgtgactcttcatatgagctgattatttagacttaaaatatcacttgggagcttgtcaaagtaaaacctgttgaatttaggaaagccagattaaattttcgactatgggaagttaaaaattatactgtgagttgaagaggaggatgacatcaatcacatcttcttttgacccattcttaacgtgcactatgatgtacatcacagcttcatcttcttaactcctgtgttcaaagcattgttaatacagatcagtgtcaaaataaaaggtgcttttaagacacttttttgggaacagtagcataaatttaggcaagacctctaatctctaacttctgaatttcttataaatcaatgtatttttgcattatttacattcatgaggcacctcctcatgttctcttgcctccccaagatgttagagttctatgcctaatcatgaattcttgcctgagtcagtgacaatatttaagtctaaaaaaaaatttagtttatcaactgcctttctctctctctctctctctctctctcacacacacacacacacacacacacatgccatgtcctaacttgagcaaatcacagttcaaggaatccacaaataacttgtcatcactttgcacatgtagaaaagaagtgacagaaatcacatttggaacgggacacagtactaccctcttacctttcatctgtctcgttggctttatttgaatgaaaacagtcaccatcatatccaccatcttctcattcatgtttaagatgtcgcaaaatttcttatcaagctgatacattacattttcccaaatttcacatttagaaaaaattttaagaaatagcgagatgaacaaaaaggttttgtttctccaaaggtctttcgcagtcttcccagttctgaatggcaatggtcttcaactctgcagcaattatgggctgtactcctcaaattcacattttgggaatgcagaagccttgtgtgtgtgtgtgtgtgtgtgtgtgtgcgttggaaggggcagtttatatgtaataccatgcagatccatagtctatgaacatcaccaaggttaaccaaccttaaatgcaactatcagccccttgccagaatctgcagcaacctccttttttatatatctggttcaaatttccccttgctgacaatttaaaaataattctctctctctctatctctccatagctctctgtcactctgtctttctggatgaatacatacatagacaaatgagggagaattttctctctctctctctcatgcacacgcacacacacacacacacacacaagcacacacacacaatcacccaatgcaggcagcttgctaaaggatataactctaattatggtttcgacccaattccccctggagtccccaaattaaggttcaaaattatgagagcagtataaaggagaaatttactttataaaaattgtaatatcttagtagcccaaatccctttactatcaaaaagaagctgaaaacggcacattcatccctatgtcaaggtctgatacatgctcaaaatgggaaaaagaaaaagaaaatgagttattttcttctaattaaaagcttagttcagaatgagaaaattgaggtggaaggagtctgctttttatgaaagaagtaataaccaggcacaagatagtttagatcttgcctaaatgaattgaaactgcacagttaacataaaagagagatgtcaaacaatctttgccattgccaatcattttgccctaagaatatacaaatccccagatatcaggtttttagtgggcacagattatattttcaaaatttattttttttctcagatcttttgatttagccacacttgcctcttaaatgttccctgaatacacgacactccttccttctgtgaaattttgcctaagttatctttatccgaaatgttgttacttcttgtctccaggctcctccatttcaggaataaattatgaaatcagaaatgttaattttccgtaataagggaatcttattaaaaagacttgagagctggaataatttagaccaaaagttacaggtcctattccgttttgccacagagtgcgggctcactataacccttagcatgctctaaggggttattagggtctccaggtaatattgcataattgctaatgcattataatttttggaagacatttatacccatagtttgttgaatctatatttaccagttcttctggataaacaccttctgttttctattaaaaatgattttacctttacatctaacagttgtctcagtaggcaggcatgaaattagtatgatcttaggaactgagatttatttaatgtgacaaaattccagtccactgtcttcatctgggattaacttcacattttaaaagtgtatgctgcttctatacttcatttttataaagaatattacatttgatggggaataattaaggcaaaatgaaaactgagctataattttacacctatcatcttgctaaaaactagtcttgtcttgtattttcttgccttagccactctcttttgccaaattctcctaaatacacctctctcattatataaagcagtcacaacaattaactattggggaggtaaaggtggaaagaggtattcaaagcaagcaagtaccttacataacctgtaggtccttgaggtacatatgcaaacaaaactgtaatcatagacctcaatcatcctaataagtcatgaatcatataatagcaatttcaactgtaataagtaacataaccagttatattttgcactaaaaatatcaagtatgaagaaggcatctaactatttatttgtcaaactagacacttagatggactgttcatttcaaagcatgttttgggatctttttttttcttttcaccaaaggtagtcagtggctgaaatgtctatatggaagaacagaaagcccaccctgctactttttaaatcttttatagcagaaaagtgactgatagaaggatttaccagaatggtcatagagcaagtgagcagggacatagtttagcattaattccctagaatgctaaggccagatgaaatcagatggagtgaaccgtgttgatcaagctatgcttcatatttcatgagagcagtgtcttagtgttggtgtttgctaacagagaagctatatcaaaaacagctttcagcttttgatttctgaaaagtagtgaatatccacatagaatagtgactgacatttaattacatagatcatgtctaaaccacaatccagtcctaagcttctcaaatcttctaggatgtctgttaaaaatgttaattcccatgctccaattccaagcactctcatttactggctctatagggctcaaagatctacattttaaacatctcctgagcaatttaatccacccatcatcatatattgcacgtctgtacccagcctggtcaacaatgtagtcatgatagagtggtagaaatgggctaggtgcagtggctcatgcctgtaatctcagcactttggtaggccaaggcgggtggatcacctgaggtcaggagttcgagaccagcctggccaacatggtgaaaccccgtctctattaaaaatacaaaaattagctgggcatggtggcgcgtgcctgtaatcccagctactgggggagctgagggaggaggatcgtttgaacctgggaagcagaggttgcagtgaacggagatcatgccactgcactccagcctgggcaatagaatgactccaactcaaaaaaaaaaaaagaaagaaagaaagaaagaaagaaagaaaggaaggaaggaagaaagcaagcaagcaagcaaagcaaagcaagaaaagaaagaaaggaagggaaaaataaataaatgaatctctgtgtggctgatctaagttaggggcctttctttagggaggctaattcacctgttatccagtttgaggaaacatccaggctgaacctttctagcttctcaagttagaatacaatgatttggggtttcacacgggatactatcagatgatattttagatacaaattgatgtccttttaaaaagtcatgaacaaaatgtaactgatattatgttttaattagcttcagtcagcctacaaatatatgcattttgacgatgttaccaaatttgctgcccattttacttaaaatcaatagaacagtttgttgtgaattcaacaatccttacagaaaatctgtcctctttgtggtaaggtagccaataaaagtttattaatattcactatagtaacaagtaataaaaaggcatctaaaatttttactttaaaagtaattgctctagacatttaagtaatctgattgatttaactctcgagtgatgatggtatcatatagcctccatctaatgagcattgagctgctttcaaagcagtgtcatatatatgaattcatttgatatttacaaggtccacagagcatcttaaagtttagagagacatgttcttgaactggttctgtgaactgtagtttcatagatttttccccccattggattttcttatcacataaaatagcagtactacaggaaaaaaaaaaaaagatcaagccaaactcagaacttatcagctctcatacacaatcattttctcctacaccgataggttgtgaggctggcaaatttctatgaaagaactttgtgacagtcccattagacaatacccttatgtatcccaacaactttaaactcaagcaatattgaactattctagttttctgcaggtgccatgctgtttcatgattacatgactttgtccaactgtcccctctgcctgggacttctggcttccctctcttttctgcctggacaaatcctattttccctctaaaactctgtttaaacatcatctccatggaaactttcttctctgttctccatctgtattatttgtttacaaacccaacttcccctgactttcagcactcaaaaggcaaatcatgcatcttattcatcttagtatcttcatggtgtctcctaaggctaaaaaatcaatgaccaatctgaaacacaatattaaaagtgactacttttctcactaaatccatttgaatcacattaataagaataaaataactaggccagatgtggtggctcatgcctgtaatcccagcactttgggagactgaggcaggtggatcatctgagctcaggagttcaaggccagcctggccaaaatggataaaccccatctctactaaaaatacaaaaattagcagggtgtggtggcaggcacctgtaatcccagctactccggaggctgaggcaggagaatcaattgaacctgggaggcagaggttgcagtgagctgagatcgcaccactgcactccagcctggtgaaagagcaagactccatctcaaaaataagaatacaacaacttaatagaaataatttatgactattatgtggacatgtgcttaaagcagttatcctacagccagttgattttttttaatttttcatttacattttcttttcagtaggaggatatcagagcagttcagaatgtagatgttgaagccagactgtgtgcaaagcctgactcttcctcttcatagccacctgacattggagaaggcattcagttatctgggcctcactctattttgtgtgaaatgactagaataacagtacttgtctcactggatttttgcagggattatgtgagtaaatgcatgcagagttcttaaaacaatacatggcacctagtggattctcaatactggcaatttaatagttagtacatctactaaaattgttaattacctatgatcaaaagtatacatacaaaacaaccctggatatatttattcctgtcacatccattcatgttccaacatgttcttttgaataaattcagatggttttcattcatttctttacccccatacttttactaaaggagctacatgggtaaaactatgtaattaagtatctaagttatcattgttccattaaatataatgcaaactgcatgtacaattgtaaatgttctaatagtcacattaagaataatataaacttacaggtgacacaaattttaatattgctttttttttcttttttgagacagagtctctctctgtagcccaggctggagtgcagtggcatgatcacggttcactgcagcctcaaactcctgggccaaagcaatccttctgtctcagcctcccaagtagatgggactacaggtgtgcaccaccacatccgtctttttttgtgtgtgtgcagatggagtctcactatgttgcctaggttggtgtcaaattcccagcctcaagtgatcctcctgtctcggcctcccaaagtgctatcattacaggtgtgagccaccacacccggcaataatactttttctttaaagaaattttaaaattattttacttttaatattattaaatattattttaaacatgcaatcaatataaaaactattgagatccattgtactagccacattttaggcactcactggctgcacatggccagtggtctgggcactggcaatggctttatttttattttaattttttttttttgagacagagtctcactctgtttcccaggctggagtgtagtggctcgatcttggctcactgcaacctccacctcccgggttcaagcaattctcctgcttctacctcccaagtagctgggactacagggacatgccgacacgaccagctaatttttagtagagacagggtttgaccgtgttgcccaggctggtctcgaactcctgagctcagacaatctgcccgcttaggtctcccaaagtgctagaattacaggcatgagccactgcaccaggccaggcaatggctttttaattcaaagatgctatttcaactcaataagatgcagctttttaaatttgtcactaggtggtgttggagacaaatacagtactgctccttgactagaggaaaagttcttaaaatgatgcagtcaaatcttacagtacagtgtgcctttggctatgctgattacaaattctacaaagatagttatgatgaactaacaggataaaattatcatcttataataagaaacaagcaacattaagaagcaaatacatcctaattctcgtctaacagctattctgaagtttgctgggcccagtttatgtgcaagaccatgaagttttaaaatttcatgaagttttaaaatttctgcaattcctgtaaagtgtttaatttcaccatataagttgcatctgatggaatctctttttatccccagaaggcttagggtgtttaaatcacttgtttagaactacagtttatttagccaaatttcttttccagttacactcttgaacaatacttcacacagcatccaaacaccatagcatctgcccttgaggtttgaataggtgatatttattttgcttgcaaaaactaactaggaacaataggatattttcacttaaggatgcaactctcaaaggtacatgtatttactttctcatcaattacaacagaaatggttttcaagggaatcattatttaaaactaatttctaactccattcctttaaccaattcaaaaatgcctctatcttcagttacttgactgtgttctttgcttctcagtctgaaaacacgtagacaaacaactcagggttccaagctcaccggaaatataattatgcttattatgttacaaagcttctgcacctttaatcagaaatgtcccctcttccaccaagtatgaggattgcacagtggcaggcactgctagctgcttacccaatcattcttcccatgttctttgtaaatataactcagattttgctcagattagctacgtatctaattaaatattcatcttcccactgttggttgaagctaggagtaagtcagacatactctgcttcttaagatataataatttgccaagaaatactgagggaagcatttgctgcttttgcaaggaacagataggtctggtaccattcttctctacttcttcctgccttgaacatgctgtctgctgccctgaggcaattagcaaggggatgaaaactatgaacagcaaaagagagagatctgggcctctaatgcattgttgtgagctgatcaactctaggataccaccttccttcaaacttggtatataaaaacacattaactcactattttatgctgctgttagttgagcgctgttacttatagctaaatttattcctaacatggacaccttcttgcttctgctccctaaccctcactttccttctcaccattcaataggagtctgtatgccctcccctcggagctgatttcatagggtttttcccctcataggtcactattcatggagttgagctagcaaagctcatcccagctaataaatatatttaatattattgttatatcataattctgactcataagtaaattcaaaggtgagatttctatgaaaactgggaaggaatagaaatagatagtgatgctaaccagcatgtaaggggccctttacattttacagaggccttttgcaaacactctttcatttgaccccacagcagctttgcacaataggtatgattaatagtcagtcctcttttacaggtatgaaaattgaaccttagaaagattaagttactcctcactgtcatacatccattataatataaacctcctgctggagacttggtatgacaataccataatttataccatttctacttaattcctttgcttgttgggatgataacaaagattaacatttatcaaagagataccagtgctgtaggcatttgctggaacaagagtgttatatgtgttattgcatttaatcctcacaatcctatagcctgataccattaatatacccattatagatgaggaaagtgagccattatccaaaaacaatccaccctcctcagccactcctcaggctgttcctgacttaatgcctacatagcatatccctatctttagctcctaagatgttggacttttgtttttgagtgaaaaccaagcttctaaactagactcacctgatcttctggcctgtgtttgtacaattatttatttccattgctgttagactgtaaatatcccctgtctttaagaacggcaacaatctggccaggagcagtggctcatgcctgtaatcctagcagtttgggaggctgaggcgggtggatcacttgaggtcaggagttcgagaccagcctggccaacatggtgaaaccctgtctctatgaaaaatacaaaaattagctgggtgtggtggcgcctgcctgtaatcccagctactcggaaagcagcaagccgagatcgcaccattgcactcccacttggggcacaagagcaaaactccatctccaaaaaaaaaaaaaaaaaaaaaaggcagcaatctgtctcatatcatgtaaaattgcagcattaaactatttgattttattttcctattgaaatgatgttaatgaattttggctctgaaagcctgtacttcaaaaaaaactcattggattcctgacttttaaattagcttacagttttctttcaactccaagaagaaggtttaatttaaaatgtacttaataagaaagtatgcacttcaaagataagcaaatacagttttcatgtggtttaaaacaaggactttattgatcaatacaaaggttggggtgggggaagaaaagtcaatacataaaacaagatacttgtacttattctactgatactattgacatcgtattactcttgaacaaaaaaaatcaggcagatttagacagtgggtgtttttttttacttggatataaatatgtaaatgattcctttttgttctgataacacaatggaataatgtgggttctagttttatccaaattctgccatttactggttgctagttactagaccattaacaagttgatgatactctctaagcctcagtttcctcatctctaaaataaagctaatatgttgacccctcatttttatttggaactttaagtaaactaatagatttaaattgtttggccaggcatggtggctcatgcctgtaacccagcactttgggaggctgaggtgggcagatcacctgaggtcaggagtttgaaaccagcccggccaacatgatgaaaccccatctctgctaaaaatacaaaataaaaattaaaaaaataaaaataaaaagttagctgggcatggtggtgggcgcatgtagtcccagctactagggaggctgaggcatgagaattgcttgaactcgggaggcagaggttgtagcgagctgagattgttccactgcactccagcctgggcgacagagaaagaccctatctcaaaaataaaataaaataataataataaatcgtttgccacatgcctgtatatagtatgcattcagcaagtataattcatactcttctctccttaaatctcccaaactaacttgattattttaaccatgcttctcaggtttgttagcttttgaaataaaggtatttctagaaacctgatactaggaaacagtgtattaaagaaataataaataaaagtcatttttaggatatagctatcacttttgtgacctaaataaatagtataggcttcatattataatgacattttgtatgctctttaaagcaattttatttattttcattttctttttaagccctggtgaatgtcctcattcttgggttttactttctagaaatgcttgaaaatagataaataacaatattgcattatgtagatgacaaaagacacgtacatgaaaaagtgtatatttccaaagaaaattggaaagatctccatctttctatataaaactttgaaatgacattgattaaattatagagaaaggctttgtttggtaattttcttaatccctagaaattccaatcatcttcaactgaagatggcaataacgctccttgtaagtaggacaacgggagctcatgacatccacagttgttggagaatgagatttctgactttcagaaaatcatgtgtctgaatttactgcaaataatttaaactgtggctttcaaagctgccccttagagtcccgtgataacttgtgcataagtctctcaagcctgctttacattctattttctttttatatatacctttctttatcactacaaagtgtccctattgagattcagagacaagacttaatttgattttgtgttaataataccatccagcataatggctgacacaggctgatagacagtcgatacaattttaatagagtaaaagagaaagaaaaaaaggaaagatggaaggaagtaaggagtagggaaagagggaggaagagaaggaaggagggaaggaaaaagaatgaaggaaggaaggaaggaaagaaggaaggaaggagggagggagggaggaaaagagtgaggaaaaaaggaaggaaaggaaagaagaaaggaagcaagggagggagggagggagggaggaaggaaggaacgaacgaaggaacgaacgaaggaaggaaggaaggaaggaagtctcctttgtatcagaattgaaagctcatatttatttcagtctgcctttcttaaagtgaccacattttgaactgagttcattacccaagcagtcattaaagcaatcctattgaaatactattactcctttaatttgtaatgacttcacctaacatcatcttttgtctgaaaggtttttatttgcagatggcattcagacaaaaggttagtcattttttaatcaaatttgaagcacagtaaatgacaattgctccttggtaaaagatgacaaaaaaaaaatctaagaaacttatgttttattttgtacttctccacagtgtggcagcagagacttaagaagtggaaaaagtcattcagagtctggttcagggagactcaggccacagagatattctcaacacatatacatgagaatcaaatggcaataggttcatctgtgctcacaagtcctgaacagaagaaaatattgcttaacaagcatcttatgtttgctgtaagatatgcattggcttagctgaagttcccgcagcatttaataggtaaaatctattggaaatgttaatatttcttttggactgaataaaggtctacataattggctgatttatatgatattaatctactgaaagaatgtccagttaattgcagcaaacctttattaaacaatgaacacaatctcgctttatggcagttctgttaaataaaaatagcagcaatcccatatgggtgtcacaaggattagatgagataacacactaggaagtgcatgtggcttgtgtggagtaagcggaagataaatgctgttacattgttaccattttctccactgctaccattgccattccacctccactcacctgataccactatgttccaggcagagaaacactagtcatttgtggagaaacaaaaatgactaacaggacagccctgctgtggaagagttccttctccagtaacagagatgaaggtgtaattaaataaccatgtcattgtatgatatgagaacaaatccatctacctccacatgtggcttgggatttgcctttacctttactattccagaagactctcgttcaggcaaataacttaacagctcattacgttaaagaaacttcctgaaaaatccatcagctcttcatgagaaagcatcaacagacaacaaactcatctttatcaacagcttgtgttggtgatatgtgagaagctggcattggacagataagtaccagaaggtagcataatacactatgcatcctttatcactggcatgaagaaatcagaaaaacatgggtttgaatcctagatctgcctcttactatctgcaggattgtgttcaatgtattaaataatcatcagcatatttttgtattcaccaatagtattttccccagtggtttgctgtgagagtggaatagtgtaacataggcagaaccttcagccttcacgtggcatgtgctaaatgctcaatacattttttctcatcttcctcttaatcattctctattaactgctctttcaacgttgctactttattgtttttagttagctgtcatttagataaccacaagaggaatgaaaagaatccaaatccttggatgaacaacggtacaaaacatatttagtccactctgttgggtctatggatctgtacgacctgaaggtaggagaaggatttaggagagcttggtttactaataagcctaaaatagcacctcctacacaagaaaacaggttaaaattatgatcaaacactagtcaggtttcctttcacaaaataggtgtaggtcctttcaacaaaagagctttgtaaattacagcagatgacaaagaccttgagaaaagtgaaggtattagccttgtgttgtcactctttctaacgtgaggctgtcagaccttctaaaaaaccagaaaaatgttaactgtaagatggtccctgaccctttggagacaatgcggtttccctgatgtaaccttacaaatgaaccatttgggtaatttgcatgagctgatattgtttctaagtggtatttatgctttcaaaaatgacagtaacatgatgtctttagtaacatttcccaaggagtgaacatgttcagttcagcagagaaaagcatagtgtcactaactccaggcaatcagattgctacaagcctaatgtttttcaacacagcacacagaggaaaaggacagatattttagaaaagacatcattgtattattgatatccacacaataaaatataactgcttcaagtaaagtgtatgtttccacagagaactcagagccaacaaaaacagccctaatgggaaaaatagtaactaaataattatggctcttctttcctcaaaagaattaaaattgcatttatggataagcaaacccaatcaacacagggtcgttggagggttacagaagaaacaagataaaaataaaaacggaaaaattcaaagtaaaaggagggatagaaataggaagcaactgttaaattaaaacaaaaaaaagtgaaagaaagactctctctcaattagatattctcagatatttgccctcacctctcacaaagagagtagtggaaaatataggctctccactccttcccaaggaaagcatcactatctaagcctgatgtattcatcttctgggggagatgtgtgcctgcaagaagacatttcattatttaccaattaattaattaactcattcatactttcttacttctatcctaaacatgacctatgaagtccatttgatttagccactacctatttcccagtattacctaacataatatgttcttacattctagctatcctaaatttctttcagtggcttcaccatctccctccttttctctagaaatgatttcttccttctttaccaagctggtttccacttatcctttaggttggtgcttaaccatcgcttccctagagatttccatatgcccctcaactaggctggagctcagtgatgggggctcctgatctggaaaaactctccacttctgtactgccatactcattgcatttataagtttctttctcaatgggtgctatagtttgaatgtgcaaagatcatgtgttggaaacttaattcccagtgcatttgtgttaagaagtaggaactttaggctgagtgaggtggctcatgcctgtaatcccagcactttgggaggcagagacgggtggatcacgaggtcaggaaatcgagaccatcctggttaacacggcgaaaccccgtctctactaaaaatacaaaaaaattagctatgcgtcgttgcaggcgcctgtagtcccagctactcaggaggctgaggcaggagaatggcgtgaatcctggaggcggagcttgcagtgagccgagattgtgtcactgcactccagcctgtgacagagcgagactccgtctaaaaaaaagaaaagaagtaggaacttgagtaattagatcataaaggcttcagtctcataaatagattaatgtcatcatcacaggactggttcattatcccaaaagtgggttccttagaaaaggaggagtttggtccttcttgccttctctctctcttttgccatctgctcttccaccatgggatgacactacaagaaggcccttgcttgatgttcatccttcagccttggacttccagacttccagaagcatgagacaaataaatttctgttccttatacattacccagtctgtggtattctattatagtagcacaaaattggctaagagaatgaggtctgtctcttgtgttcaccagcgtgttatcatcttcttgcagaccagctgcaaagagtagtagctcaattgattattgttcaatgacagaataaacaaatcaagaaactggttgatgaatgaaaaacatctagcaaggaaacttatgttgagctctaaccttgagcaaagtgctatgagaagcaagggtgtaggtaagggaggaatcatagtgtcttcctaaatatcttcagaaaaagttgtcatttccccctttgttgtcccacgaataatacttgtatctcatgtataatatacataagttctcttcatatagcccaaagttgagtcaatgtacaaagtaatccagctctattgagtcatctaaaatctaggtcagaaactgtcacatgtgcatatcaaagggcagaataagtcctaccacaacaatcacccttttcctttcacccactgaaaactaatgaaaggacctggggagaagtacaggagagacaagattggtggatgttctttttctctctcaaactccccaaactaaattggttgttgacatctgtcagagtcactaatcaatatttagggtacttataaaaaggaaaggcttgcatcagtttcttctcctgtagacagctgagctgaagaatactcaggtctccctcagcacgagtcagaaaatctgtgcagaaccctgtggagttgtgtctgggaagagttttcgaacatgaagttatgcctgggaagaggaagtttaggaacatgaagttgtatctgagaagattttagcaacacatgaagtttaggaacatggagttgtgtctgaaacggtttaggaatgtgaagttgtgcctaggaaaaggaagtttaggaacacgaaattctatctgggaagagtttagaaacatgaagctgtgtctgggaagagtttggaaacatacacaatattagagactggttcctgattgcactctggagaataccaaagactggtggaggattggtacagcagcccatgtgtgcagagaatgtgatgtagcatgcctgggaaaaatgggtacagctcatcccaagtccatgaaacactcaggggatgtcagagaagatcctcatagctttttgtgaagaacaatggaaattctaaggcttcatgaacagctgaaaagtctaacatagataaaggggttgtacatcctccatgaaggcagggccacagtgaagctgaatatacactcccaggaaaataatgagtacaacatactcagaaacaaccacgtcagagtgggatccaggacccccttcctgtaaataaccataaacacaggtatgaagtatttttctccctccttactctgcctcacataccagaggagcccagtcataaatgacacaggaaagaaagcagagagttttgaacctgaaatgtgattgggaatttcaacgtcctaactttaataactaaaattaatcagaaagttatagaagattcccaatatgtgaatggaggcaaagaagcaggggaggtacatagtaaaattggagacagtttgtaaaagaaataaaaccgtcttgtgtttatgctccaatgaatcgaggtatttcaataaactggtatgtttctgttaatcattgattttttttatcctgcctaatacgagtcattacatgcctacactccttcagggttaagattatgccttacttatttctgtaacagcaaccctgttgctgacatattgactgacattcatcaagtacttgttgaagaactgctgtgcacataaattcaaatctcccttaacaaaaggttaaagaaacaatcatgggagtacaatgccaccactagtgcacctgtgcttggtaattaccctctctgcatgcacagctttccctgatacattgtagaagacctaaactaggaaacttctaataacctctaccatttactgtggggtttgctatgtggatgttatcctatttattccacacaaaagcctacggtggtattattcttcccatctcacacacaggacaacgaaagctttcagaagacaggggcttgcttcaaggtcatactgctagtaagaattgaacatgagatttcccatcccaagactttgagattccaaatcctgctcctattccaccctcccacatttttcatagtgcctcatccctgaatttggaataagatcaagggtagtacacacaccccctactccatcaaacattcactggctatccatgggatcaatatattggcctggcaagtccatagacagacacagtaagcacgaatgcctcaaatccggcatcaccctggggagttagttgcaggaaattgctttcttccctttcttcttctttttttcttcagcagtcagttctaagacacctagtagaaaccatttgcattttctctacagtggaggagaccctaaccctctaatcatcaaggaaacacatataggctgaacagcaacctgctggtgggagatgcagcgggtgaaggtgagcagaggaatcagtctatgaaaacttgaagctctcagccccattcagctctcaaccactcagggaggcctgaggacactgaaaggacctgaagaggtaggacctgccgaggtaagccattaccacggcggatgaaaatatccctacgctgtggtggagaagagtcatttttcatctgtatcaggaatggggttctactaagcttgtatttgaaattacacaattgaatcccctgtaagtcatctctgttctctgagcaggccagtgatttctaaatgtagaccacataggatgtggccgaactgccaggatattttcggggacactgaaacagctccttgataaacccctgcatagcctggagcccaacaggagagagtttgagccctactcaaaatcatgttcagtttaagtaacagctaagagttgactgcctcttatggaccatgcactgttttaagcactttaattgatttagtgaatcctcccaacaagcctataaagaaataccattattacatccatttatcccactgagcaaaccgaagaaaatggggcttgagtaattttcccacggtcacggttatcgactgattatttatgtctctccaccaaattcacatgctgaaatcctaacccccagtgtgatggtattaggaggtggggcctttgggaggtgattgagacttaagggtgaagctctcgtgaatgcgattaatgcccttataaaagaggtcccagggaactttgttgctctttcacccatgtgaggataccttgagaaatcagccatctatagcccagaagagccctgtattagtcagggttctctagagggacagaaataataggagagagagagatacacacacacacacacacacacacacacacgtatatgtatgtgtatatatacatatgtgtgtatatgtatgtgtatatatacacatatgtgtgtatatgtatgtgtatatacacatatgtgtgtatgtgtatgtgtatatacacatatgtgtgtatgtgtatgtgtatatacacatatgtgtgtatgtgtatgtgtatatacacatatgtgtgtatgtgtatatatacacatatgtgtgtgtatgtatgtgtatatatacacatatgtgtgtgtatgtatgtgtatatacacaaatgtgtgtgtatgtatgtgtatatatacacgtgtgtgtatgtatgtgtatatacacacgtgtgtgtatgtatgtgtatatatacacacgtgtgtatatgtatgatacacacgtgtgtgtatgtatgtgtgtatacacacgtgtgtgtatgtgtgtgtatacacgtgtgtgtatgtgtgtgtatacacacgtgtgtgtatgtgtgtgtatatatttatatatttatttatatatataaattatatataatttaattatatattaattttatatgtatagttaagtattagctgatcacaaggtcccacaataggccatttgcaagctaaggagcaaggaaagccagcccaagtcccaaaactgaagaacttggagtgcgatgtttgagggaaggaagcatccagcgcaggagaaggatgtaggctgggaggctaggcctgtctctcctttcacgtttttcggcctgctttatattctagccaagctggcaactgattagatggtgcccacccagattaagactgggtttgcctttcccagcccactgattcaaatgttaatctcctttggcaacaccctcacacagacacacccaggatcaatactttgcatccttcaatcccaatcaagttgacactcagtattaaccatcacaaggcccctcaccagaaccagccatactggcactctgatctcagttttccagcctccagagctgtgaaaaataaatgtttgtcgtttaagccaccaggtctactgtattttgttatagtagccagaattgactaagacagtcacacagctaagaattagtgcagctgggatttgaacccaggtgacctcattcttaagagctacatcatactcaagtgaataatgtctctgcttttacaggtcttagttaaaattcacagaagcgttattttctgtgggggtatctaattaagaagtgaactcagaacttggcttgatgtttcagtacagtgtgtagccctgagtaagcaatgtgttatgaagaagcccacagaggaaattttgcaagacaatctatttctccttttacctttaacttggatagtttatttttaaatgaaaaatgctgcctgcccacctgagaaaataatttaggaaaacatttctaccattcttgtttcaatatactttatccaaaatgtgtgatatttatagactacttcaattggggtaagcagtattcctgggttgacttttatgtggggaaaatgtatgctcttaaggcatataaagataccggagcattcttattccattatcttttaattaaattgccctctattatcatcttgagaagtagaattgtgaacttgttgaagcatagaattgggcatccagtacttttgtcataatcactgcatcttcttcaattcatttgtccttcagagctttatctcttttgtgcctttaattaccatctacaactacacccagctttgaaacacagtgctccttccacagggcagcatccaacaggggcatccagtgacatccaaaatattttcagtgaatattctaagcaagaaacagaacagatacacttttctcaatattaataacacacactaagaactgttccatgtaatttaatataaactctcattttattgtgtatacaactgccttcatgtgaaaaatggggccaatgatagaatagtccctttaattcccacatatggttgtggtaaggattcaatgaattcatgacataaacttcatgaacggacttaacacacagcatgttctatcaagtgtcagctcttgctctttttctttgatctctctacttggaggcttcacaagaatatcaaaaataacatatctaaaactgaattcatcctgttccctaggactacttgccatgccactactcccctaacttctctaactcaggaataacatcatcatatcaaaaatctggttgtagggttgtcatctaattattcctttcttgcattgcccaattgcaagtctcagagtggctgcctcaaaaatatatcttgactattcattatcttcacccaaagaaccacctcctccaatttggactactgaaatgccttcctaagtgctctctccaatttcattcttaatcatctcttacctttctcttcatagcagccagagtaatttctacccatgcaatggatggaagttgtttcaatgatgtgtctttctcagatgttccagaacaatgtggaaagcatgtgtgaattgtacaaaagcatcctcatccatggagagcattgtaataaaaaaaaaaaagctccatttaatagttcttagaagcagctgtctttcaaggcatgataccaactctacctcctctagagggtgatggggaaacatagcagttttgagagacaatttaaacactaattacttcaacatgtgtctgttatagttactgctgcattaatagaggcaaataagttgacaggtgattgtaaaatacaagactattttaatataatatgtgttaggatattttacttcagtctacacataatcatcccccatgccaattgactgaggagattcatttaacacttcagagactccaggaaaaaaaaaattgcaggcaccacattttttaacctctttatgagagctttctaaatgaataacattattgtacaaaatgttttaggcaaatatgtgtagagcaaaatacattttcacctgccaccgtatattctgcagcctcaactttttttttcttctagagacagagtcttgccctgtcacccaggctggtgcactcatagctcactgcagcctctaactcctgggctcaagcgatcttccggcctcctgagtagctatgactaaatgtgcatgccaccacacacagcttacagtatattctttatgactaatcctttctacccaaagcagtaaaagaaaaaaataagacaaaaaatgcaaactgctcctcaaatgctcctacccttaccccatccatctgtagcaaagtggctaaaatcatgagctctggagataaatcctacctctactagttactacctgtccaaccataggcaaaattctccattcctctaatgttaaaagcgttatctgtaaagtgaggatgaaaaaaaaatcacaatatgtatttcattagattattgaatggattaaataagttgatatttgtaaagtacttagaacattgcttagcacatagtaaaaaatatatatatttgcttatttttattcctgttgctaaggtataaatgtttgtgtccctgaaattccatgtgttgaatactaacattcaagctgatggtgtcaggagatggggtctttaggaggtgactagataatgaagacggagcccccataaggggataagtgcccttattaaaaaaaaagggggggacactattcaccaactgcagagagctagctagccccttccaccatgttaggttacagcaagaagattggtcctcattggacatcaagtccagtttgatcttgaacttcccagcctctagaaactgtgagaagtaattttctgttatttataaggtaccaagcttatggtattttgttaaagaatcctgaatgaactaagacacctatggtctttattttttatgtgtcaatgcctctgtgctagatgaggtgattaattctataggttgtgtgtgtgtgtctgtgtgtgtttaccaccgtcaaatgctatatttagtatgagcatgcactgttaacagtgacttgatatgatttagtcataaataatattccctggagccaggttaaatgtaaatatgcatcaattttggtaatttgaaatgacttagtcctcaataatattcactcatctttttcttttctcgtttccttttccttctttgcttccttccttccttccgtccttccttttactttccttctttctctttcttttctttcagacagaatcagtctctatcacccaggttggagtgcaatagtacaatcatagcccactgacacctcaaactcttgagctcaagtgatcctcctgcctcagcctcatgagcatatgggactacaggtgtgtgccaccacacctgggtaatttttttattaatattttcagacaaggtcttgctaggttgtccaggctggtctcaaactcctggactcaagcgatcctcttacctcagcctcccaaagtgctaagattacaggtgtgagccactgtgcctggacttttttgctttttgacacctttacatggaggctttgaagtactcttttaatgatatattggataatgtatttcttccttaaaacattaatatggatttagaatatccaaaatgtatgatatttctgccatgtttctttgccaacattttttccatcctgtgaaggggctcaggtttggtatgagtctgagcctctctcctcctcctttattttctccactcttgaaagaatggagagacatagacatatctgggtggtagtgtgggaagaataagctggcatgctcttctctgctcactcctattttcacctgcctcactgtggtagcctttctttgctccagcccttcttatggatggttaacagtgtctatcattcttggggttagggtgtgagcccatttggctctcacactaaacagatgttttggcttccatgttttccctattatttccccatgtttgtccagaatcagataagaatgaggtgctatttattgtgtgtcccctagacattcccaaaaatgtttatgtgactgtaagctcttgcatctgatttttcctgaagtgttgtctcattgagcttctttctgacttatgcaatagccactatgacttttttttcttatgcttctttcaattctgtgaatatatccagttctttttcatttttggcttttacacctgctaatgttttgcctttttactcttcacttacttaacacttattcgttctttaggtttcattttaaatataaattcttcagggaaaccttctaagtcagtctcgtgttattcccttccataccatctaatctttttcttcctatcacttattttttgaaatattttctgtctatctccattatcagattgtaagggccatgaaagcaaagagtgctgtctgtttgcttgactagtgattttttttttattttttgcatcatgcgtagtgccttgcacataacaggaagtcaataaatatttgttgaatccatgaatgacttctgtcttaatttacttgaacaaccacaaattcaacatatactatgtgcaaagaagtcactttgctatgttagttatgtgctcctgccctctggaagactgttttccaatagagccagtagcagcccagcttgaagctatcagaaagtcatcttctccttctcctaacttggggaatttccatgctttatttgacaaataataaccagcaaagtgcacatcaataaagagccacttattaaaagaatgagcaatttaaccaaaaatatctcaaaaagagacttctatgttagattttataaccacatgtaaatcacaacagtatatggaaaaacacttagatcattatatttcatttattttgcatagtttatctttccaacaatatggaaaacttctaggaggcaatagtcctaatttcatctctgtattttttaaatgcttagtattagttggacaatttgtaggtattctgtaaacacatgttgactttactgttcagtactgaaaagtaaaataaggatgttctcattacttatgaactcaaatgtgaagaggagtagagaggcttacatttgaacttcaggcaaaatactcagccactttcccaacccccataaaaatatttaaaaaatgacagatgcctcacaaaataagtggtatcctaaataatttactcattggtatagcggcagctcatttcccagaatctgtaatgacatttgtttttttatttaaaggataagaatacagcagtgctcatgttatcactagggtaataattattgttgcaaaaagcagctcctattcttctggttgttttaaattggggattcagaggtgtaggaagaaattatagattattattctttgcttcttaagtgatgcactctttatatacaactgaaataattaatagaaattcaatcttcaagttattgtgacatattttaggaaatcagcagtaattatttcctatctaatttttataatcattagtaatcaggtaagagtttatcttgttttgaaaattaaattttattgagcttataaactacattacaacaaagaaaaataaggcaattttcttattactaaatcaaaaacattatccaattttttttaactggaagttttcttcgatgaatgaatatgcagatggcatatgaatggatgccatcatatgatgaaaggatccatcatgaaaggatggatatgtagacaaacatatgaataagcacctgatatgttttggatctgtgtccccacccaaatcacagcttgaattgtaataatccctacatgtcatgacatggaccctgtggtaggtaactgaatcatgcaggtaggtttttccagggctgatcttgtgatagtgaataagtctcataatatctgatggtttaataaaggggagttcctctgcacatgctccctcttgcctgccgccatgtaagatgtccctttgctcttccttcatcttctaccatgattttgaggcctctccagccatgtggaactgggaatccattaaacctctttctttataaattatgcagtctcgagtatgtcttgattagcagcatgggaacagactaatatagcatttaataatattctcatctgtatgtaacaaaattgaagttatgcacctttccttgattgattgatatgtatatcaatctattcatatatatagatttatatatatatagcttataactttaatttgtcttaataatcatgtatcacctattgttcttgatattgcaccacaaggaacacaagtgtgaaaaagaattctatgagatctaggggttcatattccagcacaatggaggccatatttacagagactaagttaaactccatacattttccacaaacaaaatttaacaatttttaaggaaatattattaaagaacgctgagagcactccaggttgtctatgcttctactcattgaaacaactcactcctccagtagcagatgagttttaatgaaatgcctgggcaatgtgaggaaatgctttttccttatcagatataacccacaacaaatcacaaaagggtactttttaatagtgttttcagggaacgggtctacccctacccttaggctgacaataatgctttaagcttttcctacatacatctgcacacttaagaggaaagaatttggcttataacattttaaaactcattaattaggatgccaccattacaagggttatggcattcagataatgcctaggctgccgtttccatttgagtaaagtaatggtagtaagtgaacatatactgtccaagataataatgaatatgatttgttgggttgttgattatattaaacataaatacaaaactgaataggacctcctaagggagaccctcagttattctgatattgttctactcattcccttaccttggctaatattttttttaaaacaagcaataagaaaaagatgaaagaatcaacaattcctaccacattgagacgtggaatccttggcctatattacttttacactcatggaagatgttgcaacataatggaaggggcatggacttgggccgcaggaaggacttggttcaaattctggtcctgacatttctagtggggttgccctattttttaatcagtaaaattggactaaaacctatctaaggattagtataaatgtgaaataaatgatggatgtaaagagcctaccacagtagttggcatataataggtgttcaaaaattgttaaatgactcttacattgtagctgttacagacgtaaaattcaatggatagaatagaaaccatttacaatgccttgaaaaactcaactacgtcagatttaaaaactgatttgtataatcacgaaaaggaaaagtaggacaatcacattaaatattgtataatcagactttgcaaattcaatctgaatttctttctaattagtcaaaattagtgaggtatggttgttgcatctcttaactactgtaccacagggtccggtcatcacctgcttctatttatgtttgctgttcccgtaaggaatcctcctaggtacaagtcccattaatagaagctggaacattgcctaaatgaaaaattttatgtattccttacttcctgaaggaactgccacggggtcggtcctaatcagcacttcattttaatacagtatcatcgagttctaaggattaattttataaacgattaatgaaagtacttaattgaatgtcactctctgctgccttcagctattacaggttgttgctctcactgattccagatcgatgcttttttaaacactcagctttgcagtactttaaactactttgcagtctctaaacttcatttagagactcacctgtggctcaaataaaacaatctgggatttgagttattgttgttgttgtttttggaatgattgtacaatgcttgaccagcgacagttcatgttgatttcctccaacagttcatgtttgctttcctccatagaaacagaaactcaaccgggcatggtggctcatgcctgtaatcccagcactttgggaggccgatgcgggtgtatcacgaggtcaggagtttgagagcagcctggccaatgtggtgaaaccctgtctctaccaaaaatacaaaaattagctgggtgtggtggcgggcgcctatagtcccagctactcaggaggttgagacaggacaatcacttaaacttgggaggtggaggttgcagtgagccaagaacgcgtcactgaactccagcctgggcgacagagggagactctgtctcataaaaaacaaagaaagaaagaaagaaagaaagaaagaaagaaagaaagaaagaaagaaagaaagaaagaaagaaagaaagaaagaaagaaagaaagaaagaaagaaagaaaggaagaaaggaagaaaggaagaaaggaaggaaggaaggaaggaaggaaggaaggaaggaaggaaggaaggaaggaaggaaggaaggaaggaagggaaattcaattttgggggttgtggcaaacactacagctaagctgcaagttcttgcacccttacaagtggtcatgtggcatggctttcggccaatgaaaagcctgcttaggatttctgcaaaagttttgctgtccttttacaggttttgccccttcctccatattgcttctgttctttcctcctgcccagagcatgaaggaagatacagtgcagcagctatttttgaattaggagaatgaagactaaggagactggaatagaatcaagattaattcagcagttaccataataggcagcagcatggatttggcccatagacattatttgctgacccctactatagacaaatggattaagttcagcccagaatcaagacagaataggaagggaaatgataatacaaactgtgcaactgcagaagaggagaaagggtgcaaaatacattaagaacacctgtgtccacagctcactcagtgacggaacatcaagtaccaaggatatgtacaagttccagacagtggttaaagcacacttcctcaggttaagataagttcaggaagtggaaaagttcacactacagctgagataattcagttttgagataacaggatgagttggagctgaaactaatggaatgtgccataaaattgtatagaaatcaatcttagttttttttatcttctttttcttcaaagagggtttgttataataaaatattctcagacctccttctatccttgttatactttttaagacaccctggatggtagtaaatccttggattccatttcaggatataagcagaaagagatgggaagagaccatgaaatctctcaagagagaatgtcaagagaggcattatcatcattatggtctctcttgcatgatctcaggtattatgagataaaatacaagtgtactattgctttgtgaatctgaggctatctggcctttcttaacatgaaatacatcatggcatgtcttgaaaacttaagctttgatcatgttcagtgaatagagaggattgaacgtttgatcaatctaatgaattgaaacacagttcgcgaggaactctgaagacttttcattctgtcatcattccactatgtggtaaataatagctagcacatattgatcacttattaggcatcaggcactttgtagtgcgctgtatacagtctacaattgagcgcatctaatcttccaaacagcagtataaggtgtcatgaccatgctaacttttcagacagtcttatagggaaagggcaagtttcttaacctcaatttgtatgaagcactaagatatttcaatgaatattccggatcaaatgtgtttctccttataatttttggtggcaaaaaaaatctgctgtcaaatacataatgtacttttgtttcctaggttatacagctctagctacagtcttgagccctacacaaccctgaaactgggagtaaacaaatgtcacaaacatgactgtattattctttaaaacattttatttacaattcagtttggtgagtagttgtctttaaagtttttattctttaaatatttgcttttctttctattttataatatatcaatacttaggaaaatacagtctgaataaatgtgtataacttttcaaaataatttttaagataccagcaaaaatttggtaaaaattgggcaaataattgttgatataatatattaatgcacaaggaaggcaacgcatagaccatgagagctctcagctctttgtaaatgtcttaaaagctacataggactcattgtttaagctaattctatatcattggataaggagttatcaaaagcttccaagtaccacaataaaataagtatattaatttatttgtttattcattcagtaaatatttattgataatttttaaggatcagactaaacaagatggaccaagtcctggctttctcagcacttgcacatcaacagacagctgtgtccacaatcagtaagttgaggatggcaggacagatcaccagagcataagcaaaggtatgagctacactcacagctaagacactgaactatctgccctgggtctaagcaaaggccacagggttggttttccagaagctccaagataggtgcatgtatatccagatccaatgttcacagcttggaactgtaatctttaaaagctaagttgagggctcaagtcaaaacatttctctcccaataaaaatcatgactacttgcagaaggaaaagcctggctatttggtttttagggagtcaggagcactaacctgctctttcagcttgcaagcttgcaattctaggcttccaagtgaaaaccaacctgcttatcttgcctcatctagaattagaggggtgacagaggaaattgggaagtagttttgaaagctgcagtgccttccttcctttccttctttctctctctctcttttcttccttccttccttcctccctccctcccttcccctccccctccctccctccctccctcccttccttccttcctttttctttctttcttgacagtctctctctgttgcccaggctggagtgcagtggcacagtcacagctcactgcaacctccacctcctgggtttaaacaattctcctgcctcaacctcctgagtagctggtattacaggtgctggccaccatgcctggctaatttttgtattttttagtagagatggggttttgccatgttggccaggctggtctggaactcctgacctcaaatgacccaaccacctgggcctcccaaagtgctgggattacaggcgtgagccaccgcacccggcctaaagctgcagtttctttaacttgttatttactataatgtcaggaaagggcaagaatcttgaatctgaaataataatgatgacaatggggttgaaaaaaagtaaaaagttattgcctggaggtaagattattttttttaacctagtattttaaatatattattttattctactttaggtgttaaatacatgaagtagttaattgtcagcaataatataatgtaaagtcaaagtacaagaaagtcttatgctttcaagccttgatgtaaaaaataattatatgaagtaagttaggaatgaggtgggtaggaaattgagggtgccttgctattttcagcaactgtcagagtgttcggtgcatgatacatattttctgaatattttcagaaaatcatttctgatgtgtcagtatactttgagtcttggaacacttaactgcaaaacgaagtcgctgtgatagagaaaaaggaatatgtatatataaatgcagagatataatgagatagatgcacatttacattttgaaaatcaggttttcttcactgcaaaaatatgtggggttcttctgaggttaataattattacataagaccaatgataaaactgcatttctttgttatgaagcctaagatattaggtgtgttttcatgcaattgcattttaaaaacaattcttgcaatcatcttattttgtagtgatgttcatgaacatacttaataatagatacattttttattacaacaaaatactactttaataaaaacaccaagttatttcgaaatgcacaggaaaagtttctctccattgttgtgcatgctgaaagaccacagtgggaagcacacaggcagagggaaatctcagaaatatgaactgtaacaccacacatagcagcattctggtctcacaagtcagtagatactttccccactaaaattttgtttcaataattaatataagcttttttcatctgaagtatctctaaatcagagaaggttaaaatcaatctgtatgtatgaacttgctgacaagctagtgtagccacttgcctttaggtttttattattttcccagtggctgatgggcaggcagcagtgttaagcctgctaactgaaacatattctaaattatatggatctctggaggggatgcattctacttaaccttggcgtttgttttaaattacaggaatctaccatattatattatccaagatttttaaaaatagcttttattccttttctaaattgcatctcaaggttgttagatttcctattaaaagctaattaattaaagagaaaatacatacatatgtgtgagtgtgtatatatatgtatatatacatatgtatatatatactcttctacacctgccagccagaaccaacaataatattgtcccaagctatatagtacctgcttccaaagaagtttaaaatccattttagagagccaattattgatgtttaaagtctgtaaatcatgaaggtagcaatacttctaagtatcaaaataaaagctatgaaatgccatatcatgaatatatgctctctcacttaaactgttagaattttcattttttaaataaattttattgtatgtatttcaggtatacaacacgatgctattcctgctctgtttgctattcaaaatctcccccttttgaaataatatcactaaaaggactaaaagcaaattgtttgcttaatgggttgactgatttttaaagactaaaagagtcaaatatagatgacaccaaaatgtggtccagaaccaatagcttgtctagcctgaagaccggatgaattattttaccccattttagaccatttccatctgttatttccaacacaaattaaataagtcacaagaaggtatcatgatcaaggatacctttctggagaatagccatgttgattttaaactaacagaaatttatttgtggggtaagtatggatacttaataaggaaaaacagaaaaaaacttttaatagtcccttatttatttcaggtactgtgttagctaggtattttacttattccttctcagcgaatactataaaacccatttattaagaaattgaggctagacgatgtaaaagaaatgaatctggaccaattcctgcaaatcatgttaggaagttacaagaaagtaaaaagattcatagtcaatcaagtgctgtgaatagccattgagctctggaaagccatagaagcagacacattagatacaggatagatggttcctgtagaaagctttacagaaactgaaaaagcctaaagctacttaaatgatggtaacagtagggtagagtagtacttaaccatatgacctttggctagactactgtatttgaattacggctctgtcacacactaaatatatgattattgataagttattcaccatctcagtgcctcagtttccttctttataaaattgcaataggacctactgtataaaacctgtgataatttggtgtcaaatgcacataaaacatagcatagcaatgtgtataaagtacacatatatcaaatgttagctctaattatttctgtgaagacaaatatattgcttgtggaacacatggggagatcgatgttgtctttacagacactgcagtgcactagaagagcatatcagtaatatcttgttctttaaataaattactagcattcatatggtatttatcctgaacagggaatatgataaagacttttatggattttattttcatttaattttaatgggattttgatgaatgtactattcccattttgcaggtgaggaaataaaggtaaagtgaatcttaagaagttgcttgagtccatagctgtagtgatagtgcccatattgaaaaccaaatcatctgataagtccagttcctgaccactacattatggtgcctttctaagggataatgtgacacaggtatagaatggtgacaattgtagccataagtgccctttccattttcagccctccagtgcttcatgaagtactgtgttcatgaggggctgctgaatgactgcctgtaggacacatcttcccagagcacacaccctggcagatcacagcccaggagaaccacgagcccatctgaaacctcagaaatagcccagtgcctgcaggggatggtgctgcagcttcagacaggacctccatgaggggcagaagtttggtgaagtatccctgatcacagtcagcttcacatcgtagggctttgaaacatgatgctgtcaattcatcttgaattgttcaaggtcaaactcaggcattcaatgctgtatcgttcctctccactcaattccatccctttccattccatctcattccattttttccattcgctccactgtattccattccattccactccactctactccattctgcgcaaacttattaactacttactacactacttagtctgtaagcaaaaagcagctgctgctctaaagatgaataaaattaggcttaacacaggcttaaattaggcttaaatcaggctgaccaagttccattcagtaggcaagtttaaagagccaaaatctataattttaatacttttagctctaaagctagaattggacacagtgttcttccaatgtatagaaaagtctactcagaaggctttatttttgaggacttggagagagttaaataaggtattttcgacatatgttttcaatgaagcatgaaaactagaaaggtgtgtttcactggctgaggatacttcccggtaagactcaaggtctaccatctcaaattagagttctctcaaaggtgctaaactctactgatttttttatgaatcgcatgtttctatattttttttgccaaactctcccttctgtaaagaaccatgatttaagctagcaacgacaaatgaagcatagttaccctcatttgatttgcggcatttcagactcaactatttttctgaaacatctattttatttcaatagagacaagaagcctgctagtttccttaatcctgcgttttaaaaacatacttctatatgaattggagaaatgaaatgtgctccatagtttatgttattccttacttttggaatgtatcctaatctcaggattcttcattactctgactacatattatatttatttccatcctaaggtttttcaaagataggcatgtggattatctagatcaacaatccctaaagggcttttaaaatgtcaattcctgggccctactccattcctgaaaatcaaaattttgaagcagaaatctgagtctccaaatcatctcccttggtatatctcaccttctatctccctttgcaatcacaagacagtgaccaggtccagtgatgatatcatgggctgtctgtcacctgcctgacagtgattcctggagactctcacccaaacaaactctcacagaaactaggcaacgtaagagacaggaaggttcagctggggaggcttcattgcgtcaggaatgccttatataattccagaaggtcaacaagagaaaaccaggccaacagagcataaatgtcaacatttatgggcccagctggtgtcctgctgaggctacgtatttgagattttgcaagccaggcaatattgcaagttaacatgctgtatagattctgattctgcaggaaaattctccttcagtgttgcatagttgcatttactaattctgctttcttagtattttgtgtatttgttttactttgtattttaagtttcagctaaacaaatgacaagtaaccaaaatacgaatgaaaggactatttcctatgcagctactgtgtttacatatattacctcatttaatatggttaacacgtcagggcacggtggctcaagcctgtaatctcagcactttgggaggccaaggcaggcagatcgcttgaggccaggacttcgagaacagtctggccaacattgcaaaaccctgtctttactaaaaatacaaaaaatatagctgggtgtggtggtgcgtatctgtaatctcagctactcagaaggctgagaaatgagaatcgcttgaactcaggaaacaagggttgcagtgagccgagatcacgccactgcactccagcctggctgacaggatgagactctgtttcaaaaaaaaaaaaagtaacactttgagaataggttcttattatctctatattaaaaaataaagcaaacaaaacgaacagtggataattacttacccaaagttaataaatcttagcattggatcttgagccctgtttctttcaaagccaaaatctatattttattctattacactctgctgtttccaaaacaggccaaataatttctacccctcaaacatttaccagtggcagaaaacaactatgaaatcacactgaggccataaagtaataagaggaaatttctataaagccacacaaccatctcatttccctgtggccacactttacattcattcaatgaagaatcaggatctacactgcaccacacattgggggctgaataagcacagacatacctggtaatctttgatttctcagactctacaggagatcaaggttctggcaaatgtagaagtacctcaaacctttctggtcattttcaaacttaaattctgtatacagtacaagcatactgttgagggtggctttaatgtgtaaaactgctgcttatggatagtggcgatgggtgatgttgccacacctcatcactgcatgccatttaataccttttatccattaaagttcaggccaccacatcagcactacaatattttaaatccttatatctgaaagtacaggaacctctccacttttctgtgtgtataatgtagcccttggcacattgcggaaaacaaaaacaaagaaaaaatacaaaaaaatatcaccatctgtactgggttgaatagtgttccttaaaatttcgtgtctacttggaatttgtgaatataaccttatttggaaatagagtctttgcaaatataatcaagtcaagattaagtcatactgtattagagagggccctgaacccaatctgacttgtgtccttatcatccttacaagaagagggaaattgacctggcgcagtagctcacgcctgtaatccctgaactttgggaggccaaggcggccggatcacgaggtcaggagatcgagaccatcctggtcaacatgatgaaaccccatctctactaaaaatacaagaattagctgggcttggtggcacatgcctgtaatcccagctactcgggaggctgagtcagaagaatagcttgaaccagggaggcggaggttgaagtaagccgagattgcaccactgtactccagcctaggtgacagagtgagattccgtctcaaaaaaaaaaaaaaaaaaaaaaaaaaaagacaagggaaatttggagatggagatacagataatgaaaagaagggcatgaacagatggaggcagagattggagcgatgcatttataagcctaagaatgctaaggattaccaccaaccatcagaagctagaagagataagaaaggagacttctacagcatgtttagaagtagtatgtcccaccaacaccttgatcttagacttctagtctccagaagtgtcagatagtaaatttctattgttttaaaccacacagtttgtgatactttgttatggtcaccctaggaaactaacacaccatccataaatatccatgtaccacatgcaaggtgctatgctcagcgttgagaatatggaacaatggagaggtatacctggaatctgggacacgtatcagtgtctatagacatagaggaggaaggtaaaagagtgttccacttcattttaactccagtgtgttgcttcttttctaaggagccacagacaatgacttctcatcctcctcttcctcattattccttggcttacaagctaatgcatacatcatggggttcccagtatttccttttccccccaatattttatgccccatgcttgtgtttatattgtgatataataaaatggcacgaagtagaaacacacccttcacatggagcacacattacccagtggttttattaagacttgtgtttcggcatctgagctatgtgaaatctcactcaaggctctgtaatgccggtatgttctctatatgaatgtggcacgactgaaaacataaaactgttatcacaaaactgttacatacattgtaaaacaaacagctctctgatgtggtttggctctgtgtccccacccaaatctcatctcaaattgtaatccctgtgtgtcaagggagagacctggtgggaagtgactggatcgtaggagtggattctccatgctgttctcctgacggtgaatgacttctcacaagatctgatggcttaaaagtggcagtttcccctttgctctctctcgctcctgccgccttgtgaagcaaggacttgcttctccttctgccatgattgtaagtttcctgaggcctctccagccatgcagaactgtgagtcaattaaatctcttttatttataaattacccagtctcaggcaattctttataacgtgtgaaaatgaactaatacactctcaaaatccatccaatgcataaaagcaccatttgaactgccacaaatgcaataaggcctctgaagttttctagttccaccctttccatcacctcagctaaagtatcttctcctaaactccaggacctccttttgtaagagtgagaattcctaaattaaaataaccaacagaaagtgccaaagaaggaagggagaaagggagggtgggatggaaacaaaattgatgagtgcagttgtaagtttcagggattctttacattcctaacattggtttatttggtattataaattaagaaaatttaaaaattatccataatgcccaatgactttgtttacagatttgtatcagatcttacaggaaatggatcactgaaatagtcatgtccagattgagctgacatttactgagttccccttccacttcaaactcagtgtcagataccattttatatgctgtgtaagaattcttttgtgaggccgggcacagtggctcacgtttgtaatcccagcactttgggaggcccaggcaggcggatcccgaggtcaggagtataagaccagcctggccaacacagtgaaaccccgtttctactaaaagtacacaaattagctgggcatggtggcgggcacctgtaatcccagctactcggaaggctgaagcaggagaatcgcttgaaccgggaggtggcagttgcagtgagctgagattgtgccattgcactccagcttgggcaacagagctagactccttctcaaaaacaaacaaacaaacagacaaaaaaaaaaaaaaagaattattttgtgcttatttacacaagctcaaataggagtgaacaaagttttattagcttgtatgtagtcacgcattattataaccaatattaatactgggtcttaaacttaattaggccttcagatttgaaaatctcaatatttctttctactaaaccatgtggcctcaccaaatatatttctgtatgaatcctagagcacatgttatcttgggaggagtctgttttttgcttttacaaaacagtcatattgccaaatatttaaaagaagaagttctacaatttatagtatacggtcacactgtcacctgacaacctttaataacaaaaatagacaaccttacatgtacatagataacatttcagcaacagttttctaacagtgagccacagctaaaattgtgagcatgggtacttcagcatgaaggctcaaatcaggagaatacgtacaagagagaggctcatgagaatttaaccttaccttgcatttcccctaaaaacaatggctctggattcaccaattcagtgttcaagatgactttataaaatataactaccctaaataatgatgattcactgtactttatcttactcttaaacatgtacaaattttagtagcttatgaaaggatcaaggtaactcctgtagaaagaaaaactagtttaatcttgtttgatccattatttaccaaacgtttttgactacagatctaacttataaagaatacatattatcacctcacaggacaggaatgcattgtttggaggccctgctgtaggtgttcagaggttttttcagtccttcttttgaggccacatgatctattatttagagtgttttaaagcatcactcatgaccataaatcaagagatgaggcctggcacggtggctcacgcctgtaatcccagcactttgggaggccgaggtgggtggatcacctgaggtcaggggtttgagaccagcctgtccaacatggtgaaacatcatctctactaaaaatacaaaaatttgccaggcatggtggcgcatgcctgtaatcccagctacttgggaggctgaggtgggagaattgcttgaatccaggagacagaggttgcagctggccgagactgtgccattgcactccagcctgagcaacagagtgagactccatcacaaaagaaaacaaaaaaaaaaaaaaaaagagagagagagagagatgaaaaaattacagagatcctaagacatctctcatccacttggctatcaatatcaacctgagttggtactgcagtctgataaaattcccaacttgttctttgattagtagtgcttcagccttatcccaatttattgacattcctatgctgataaacctactcttacccttttcctttccctgagggaatgtttattctagtcttaaacttgagccaggcagtcaggctctgggagtgagtggagagttcactgtataaaagaatgtcaaaggtaacctttaaggaacgctgtgccacctccagagtcagatttatagtgaagttaacgaagcttaggcttcagacccctccactgcacagtccagtatcctacccaataaattctagcaaaatgttcaagtcatatagtcttataagctttctatttatttcttttcttttcttttcaagacagggtctcactctgtcacccacactggagtgcagtggcataatcaccctcactgtagctttgacttcctgggctcaagtgatcctcctgtataagcctcctgggtagctaggaacacaggcacctgccaccaggctcagctacttttaaaatttttttgtagagatggagtctccttatgttgctcaggctcatcttcaactcctgggctcaagcaatcctccaacctcagcctccaaaaatgctaggattacaggcatgagccaccaagccccgcctaattttctaatatttagaaagtaagatagtttaactataattagttaatactgctccttttctgctacaagttttctatggcacgctttctttcatatcttttagacttgaaggcaactgtggacatttttagaatgcagctaagtaagagaacatgtagttttatttatgggttcatagctttttatgtacagtcaggttatggatgagtgtcctagggtaggaatggcttccacagatgtgtctaccacccaatgtgccaactcatctagtgtcataattcaaaggcgacccaaaagtgaaatgagcatcactggaagtccccaactctggaagaacaggaatagtggatggactgctcatttcaaagtcagttaagcctaataacttagagtcaaaaatattttaaggcttcaaaaatatatttttaaagacttgaaaaaataactcaaataaaatcgagcttgaaaatattcaaaagcttgagaaagctcaaatatatcattttaattacaatttataaacatgttttaaaatttcaataaaatagcgaaaaatataaagctcttgattaggacgttatgaaattacctttattgatatttataaagcaagttattaaagaagtgtggtagaatttagattaaagtaataatacaatgtaaaacaaaagtgatcaaaataaaaagtgaaattgtgaacttacgaattacgttgcatgaagaagaaagttgtaatagcatcaaatatatataaaaatatatatataaatatatggaacacaccaaaagaaacaatcattagtacaagagagagaaatttttacaagaagtaatgaagaagctcttggattcagaatagtgaatctaagtaacaaagaggaataaataatgaatcaaataattacattaaaaattaatttcatgttgaaatgaaacaaagtactaacatttattaaaataacaaaatgcaatacaccaccaaaatgagactatcagaagtaaactgttcaatgaatactgtcaattcaatgatgattttaaattaatgtacaacaaagcttaaaatgtcatgaaatattacaacttacgttactaaaggaaatcaatagacattcccaaatttgacaacaatcctaaaaatgtatataatattacaaataatgaattatgaagtaaaataaagctttcctattgacaataaaaaataaatgtttatcaactctgtgataagcctgaattatttttctatcttctatactaaaagtagtgcaaaatcattcaactttatgcaagcaagaaccaggaaaactatcacacagatctataaggcagctattttattttagaatgttactcttttaattttttcatatgtatatcatttgtcagttttctaaaaactgtaatttcaaaattgatcattcctaatcctaactattcatttttacacttagttttatattttaagcatgtatttttttttcataagagaatcctaaaactgtgtaatctctggaccccatgaaacctaaatttgctctacaatagaggtattagatgatgtaagtaaacttcaaagccaattcaaaaacagggacctaatactgtttatgttgtttgctttgttgtagctaatatgtcagctgtgaaaataagtaattcaaaatttaagctgctggaactttaaaatattttgagcttaaagggaatgtgaactaaatctcataagcagacagttgtaaagtcagcaggtgtaacctttgtttctccgattacagattagccttttccttacctacattgtcttgtaaaatgttgcaaatgactaaagggtgccagggaagaagacctttttccttttaagtgttgattttcattatagattaccttccatctttcttctctcacacatacttcatgactaccgcattgtctacgatggaatgttaaatatactcttaaattggaaaggaaataaaaataacctttatggataagaaaacgaaccataatttattaaattgttgtgactcctaaactagccttgtacaaaaaatgttataatactgttaaattgatttattttctgcctatataagcaagaccttaacttttaacatctgagtactgatcccatttctctggagttcatattttccggatggtctttcccagctttttgcatgaataaactcttcaaacctggattctggtcctttcaattatttcaggctgacatagcattgaaaaatagagtaccactgacctagagtcagcctatgagaaattctctctctgtctctttctctctctctctctctctctcacacacacacacaaacacatacataaaaaatttaagacattgtattaactttatagctccacataacaaattaccaaaaattgagtagtttaaaataagtatctatttattatctcacagttctgtaggttggacgtctggacacacttgactgggttctctgctgagaatctcacaggctgaaatccaagtatagctggctgggctcttatctggaagttccaaggactaatccactttcatgctcattctggttgttggcagaagccaattccttgacattgtaggtctgaggtcacaattgcattgctagctgtcaaaccgggtgctgctctctgcaaccagaggctgccctgcattccttctcacacagagcctccatcttcaaaccttcaagtgcatcaagtcctttgcaaaacccttagttctgggaattgcccacccttttcctggaaaactcatgaataattcacctcttgtttaatgtgtaatcaagaatcataaaaatgggcaaccagcagctgttggggctgttctgcccatggagtagccattcttttattcctttactttcataataaacttgcttcaaatctttctggcttgttcttctgccactggttggagaaagctttatacttttaagttgtcggaggcatttgaactagaacgactccatcttgaataggggctgggtaaaataaggctgagatctgctgggctgcattcccaggaggttaggcattctaagtcacaggatgaaataggaggtcagcacaagatatacatcaaaacccaccaaaagcaagatagcaaggagagtgacctctggtcgtcctcactgctcattatacgctaattataatggattagcatgttaaaagacactcccatgacagtttacaaatgtcatgacaatgtcaggaagttaccctacatggtctaaaaaggggaggaacactcagttctgggaattaaccacccctttcctggaaaactcattaataatccaccccttggataacatgtaatcaagaaccataaaaaagggcaatcagcagccctcggggctgctctgcccatggagtagccattcttttattcctttactttctttttttattattattacactttaagttctgggttacatgtgcagaacgtgcagttttattacatggctatacacgtgccatggtggtttgctgcacccatcaacctgtcacctacattaggtatttgtcctaatgctctccctcccctagcccccaaacccacgacaggcccggtgagagatattcccctccctgtgtccatgtgttctcattgttcaactcccacttatgagggagaacacgtagtgtttggttttctgttcctgtgttagtttgctgagaatgatggtttccagcttcatccatatccctgcaaaggacatgaactcatccttttttatggctgcatagtattccatggtgtatatgtgcccattttctttattcagtctatcactgatggacatttgggttggttccaagtctttgctattgtgaatagtgctgcaataaacatacgtgtgcgtgtgtctttatggtagaatgatttataatctctaaggtatatacccagtaatgggattgctgggtcaaatggtatttctagttctagatccttcaggaattgccacactgtcttccacaatggttgaactaatgtacactcccaccaacacttgctttcactttactctatggacttgccttgaattctttcttatgcgagacctaagaaccctttattggggttttgatcaggatctcttcttggataataaaggaattataggactagatttaatcacaagattagattagacccactcacataattttgctatttgaaggtcaatcattggggacctataatcatagcaatgacatttcaccatattcttaggttctacccacaattattttgcaagggtgaggggttattgggggccattcttagaattcttagaattctcacagactttctatcaggattacaagatttatattgaatgggtagtctaaactaaggaaaagcaaaaagttgactcttcacagggagtttgagccctagttcatataaagcaaagaaaataaatcagagatagcaagagaccaagacagatagatgtaattcgaagagagagaaacagaaactaacttgccatgaaccgaaagattgtatattctttttcctctctgattcactaatgtatgctttctaggagaagacataacatattctaaaatgtttgtttttcttaaaaggtatttgcatttcctaattggcatattatttcataattatactcatactaaatctgaatgtttgagccattcttatgtcttccttccatgataagttgtttatgttgtggaatgtctgagtctataattaaattattgtctctaacaagttaaccatatccatgcatacattaacatatcattataatgtgggaaaacatagatgtgtaccatagaacatcaagctgaatggggctctgcagatctgggttgacgtttctggtaactggtctccattctggaggtttcaaggggcagaactaaaaactccagaagaaagagaaaatttattcttatctgaaataaagagaaggtatgataataggaaatgttattttacaaatatctactccaatttctcttcctttctaccacggaaaaaaatatttcctcatcacattcatattgctgggtttggcttggctcttgtgctgtggtgatccactgtgatcaaaccatgcccctgagactgggcactaggacaaatgaatgtggagtagaaatgccaaaatctgctgttcaactgagtctcccagcagaacccagtctagatcagctgaaccaagtcacatacagacctgtgaatctgaagataaatacttggaattgcaagcccactgtgttttgggacagtttgttacacagcattgatgcagccatagctgactaatacaacaaagaaaagaaggaaaaaatcttcagatacagaattatgtttaaatttaattaaactaaatatatacatatttatgtctgtacatttatagattatatctatatatatgacacatgcactttttaaaaatagctcctttggcagagttttgtgttaatattttcattaaaagaggctcttatatgataatattgctcacaatgaaatgtaacaactgtgtagctggaagcattatctctcctctttgggcaacagtccctgtagtctcttggttattcagaattttaaagggaccatattaccctataaacttaagcatatgcacaaaactgcttttggggaaggctacgatttctaaacaatctcagatacataaggccgaatgtctgttatctgaaacgcttgagactacaagtgttttagatttcagattttttttggattttggaatatttgcatacgtatttgcagatagaagctattttatagcttggggatgagttccaagcctaaatctaaaatttgtttatgtttcatatataccttatacgtatagcctgaaggtgactttataaaatattttaataattttgcgcctgaaacaaagtttgtgtacactgaaccatcagaaagcaaaggtgtcccaatctcaaccacccatgtggacaatctgtggttgtttggcatcattatcattcctgactctgaatttatatgctattaataagcatttattttcttacatttattcacacataagtacttaacagtaaaatatatggcatattgttaatgcagtgaaaacataatatgttcagggtaaccaaggagcacagcagtgtcaccagaatacctgttatctgtttaaaaacaccagcaatcaaaaatggcaagtcttcacttattcaaaaatgtttatattctgcagcatttcggatcttaagttttcagattatggatattcaacttgtagtacatttaattttgtgatttcttttgttaaataaaaagaaaaatccttgcagattatatgaaggtcagaactgtctctttgcatcaataaaacatcaaaagaaaaagaggaccactgggatgggaagaacacttccaatgcactactgaaaacaatgtaaatggttgggaaagttggccacaaagtcttctatttcaatagttgtaataacacatcactgttgcatataaaatgtatctgcaaatatgtctataatgactgctgatcataagatttcttgttctattcactctgaagtctaaaaaaaaaaagcaaactatctacataatccaattgaatactcattacataaagtgctaataatgtataccttctcatatacaaaaaaaaaatggatggtttaaaattgcttagatcacaagagccaattacttgggcagaatggggaaggtgatatgaatgcataaatcttacatatatgccttaccatggagggatagcttatatgcatgtggttgaaatgaggaaaccctctctcacctataaattataatttaagcattctgtaaaaatttaaattcatacttaagattcaaattattttttccatacagagcagggtttctcaattgccacactactgatatttgggactgggtaattcttcactgtggggaatgacatactcatgataagatgcttagaagaatctctggcctccacctactagatgctagaagcagtcccctagtctggagttgggactatcaaaaatggagaccaggccaaatgtcccctggggccaaaagcactcctagttgagaagcaatggtctctagaaataccatgcagtacattccttcttccaataatagatgctaatcacaagcacacaagatagccacaattatatgatgtttactacttgccagacacatagtagctcattttaattttcacaaaagtcaaatgacctatataccataactacctgatacaatttggatgcttgtcccctccaaatctcatgttgaaatgtgatcccccatggtgaatgtggggcctggtgggaggggttttggtcatggggtggatccctcacgaatggctcaataacctccccatagtaatgagtgaattctcactctattacttactgtgacatctggttgtttaaaagagcctgacatttctcttgctccctctctcatcatatgacatgcctgctccccctttgctttaaataaaagcttccttaggcctcactagaagccaagcagatgctggtaccatgtctcccatacagcctgcagaactgtgacccaactaaacatttttattttttaaaataaattacccagccccagcaattcctttataacaatccaaaatgggctaatacactacttctatgttactaatgatgagactgagtcatagagaagtgacttgttcagacagtaaagggagcctggatttgaaaaagggcagtggggcatagaaggataaagtcctaaatgagattaactttgggacaattggattccagagagactggatacatgggtagtatatcctatagaaccctctgctcacatgttaaatctgggagctgagctagatttcagaagtcccttccactactaacaatctgtaagtctgtaaattgtagacaaatctatttggttagatttattccaataaaagcaagctgaccacatgtcagataaggtccagctacagcataatggcatgatggcagccttccatcttcactgatttaaattcgtgctgttttagtgcatataacccccttagatttgtctgctatgagaaaattctgcaaggaagagaaggctgcttacaaaacagtctttcaaatttctccatggatctcattggcaggtcttcaaggtcaggaccaatcacagacatggctggagaatgcccataaactcttcctcctctaatagccaatgggagaaagggattaactgctggtcagatgactgtgactattaacattggaagcaattctgtgcttgaaaacttgatcagtcaaagagggtaaactacattaataatgggcactggaaggagggagctctttttcaccgaagtccccatggtcacaacaaattagattagagtgcctgagaatatgctaaattcatagcctcatcgaaaatttctctttagtactttatctgtcgctagtctctcttctcttgcaatgggtcatttcagctgctgctaaaaccagctttctattacagtttctcctcatgtcatacaattccttaaaggctgatagcatcatcggtccctgattcttgtccatttaacctccctacccatagatacaatccaagactggtactcataaattccaaaggaaaaataaagctgcatattgctacctctatgacaggttacttttggggaatagaagattccaggacagctatttcctgtgtttattgattatgaatcttgaagaaagaaattttgtgtgagcataacatatacataaattttaaaatttcaaaaaaaccacagttctcaatcttttgaatctgccaaagccagcatgacacagtgccatgcctaatttcagagagtacctcctctctccccttccgtagtcagttgtattatcatcctttaaaacgctttagagggtcacttacggtcactcatggcatattcagatagtttgtaatccaattacattcttgaagatttaaagaaccagaaacaaacaaaaacatgcaaacatgagctacagtttttattgtatgtgtctatatataagagagaaaaatggagatagacgtagatatatgtgaataaattgctgcatataaaaacattagttaatataaaaaacagaaaataaatatctttttacttctttattttaaatgctaaaaacttccttataagggcatcattatatttggaaaacatataaacccatttagattattcaaaaggaatacagtgatacaaataataaaactgacaagatatctaattggaattcttttggttctttcagtttacagtgataaattttaccacactgaataactgtaatttctacctgtgccaaatctatagccagtctcatatcttcttgccactacaatactagaaactttccctgatgaattattaaatgatctttgaagttgctacagttcatagaaatgtgacagtccaatgtgtcttagtgctgtgaactgttaccaaaaagactaaacatccttgacagcctgataaaaaattaattattctccttccaatggaaagaatgcaactctgccaaaacctgttaaatgtggagcttttagagttctcaatttcttctctcttggagagggcacattataatttttcatgaggattaaatagcacatgtgaaatatctaaccttgcctagtatccactggatctttagaccttagttccttttcctaccttagaatttttgttcccctaaccgcactatactaaatgccaatgcatattagaatagaggtggcagtgcaaaatagaagaataaaagaaatattgtattattgcgagaaaggataccagtgaagagatgtttacttcagatacagtaaaatattcaaatactccaagcaagtttttccccagtgagcctctgtttctgcctatgtagacatcattcgacctgtccagttatatctaggttattgtgaagattgaaaaaacaagggagagctttttttaaaaaaaaaaaaaacaaaaaacaacaacaaaaaaaaacctttgtgttacaatatatagatcttattttcaacagcgattaggtaatggaattagtgcagtaaagttttattaatgaatgctgtaattagaaaatgttaattcaatatttgcttccccaggttacattcatttggaaaaaaatgcattaatcttaccatttagtgataactctttcagttcaacctacagacacaagatcttgaaatgaaactgttgattaatttatttactcagtaaagatgctactggatacaatagaaatacaagtcataaatgttttgcaaacaatgatagtaatgaaagatattagtctttttccttagaaattaacttagtggattgagacagtttaccagtcttgccttacaagaactattttaagcacctaaaaagtaatcatcccaagagaaaatatagagtgcaaagagcactttgctatttcctcctgttattacaaagcataataaatccctactctggactatttcttgcctgtatcctgattagatatacccataaagtttgaaaatgtctgcaactgagaatacttttatttataaagcgggatagaggttgaggaggatgtagagaacagattgttatctgtacttgtcacagcaaagcatatttttttaatacttagttttttaggcttctgttggcagattgacctttcttgagagtagcttatcttgctgtagagcaatattcccagacctcctggggttcacaaagttaagaagaaggagcatcaggaaataaagaagacaagaaagcaaaacagaaaagtaaaataaaatttctgctgagttaaagtagggtgtaaaagagccatggaaattccaaaggttgttttagaacctcctatttcacatcctactcagctgtccagaagagaaagcagcaaaaacactcagactcttggggaaacaagcattaggtggtggccagtgggggttgaggggggagtctctcttaaaagggtgaagaaagcacagatgaaaagggccaggcaatgcagactagttgtaaaagcctagaaaataacatctgaaagcttaaaggggggggtcataaaagagttggaataacaagttgtgagcacagatcagtgtagtctgagagttgtttattgcagaaagatcagaaacgttcaagtgaaccatagcaaacttcaaactgccattcacttctctcactaggtttgtgttaatctccgttccgtaaattgaaatcaatgacagcagcctggcagaggcgttgagagaattgaatgtgataatatgtataaaaataccggctgtaataattgcatatcttacactcccgatggaggtccacttcttttttctactactaatgccaatgctagaggcatagataaataagaagcatggagactgagatgggcctcacctgtctggaagccttttaagacgcacttttctggaagccttttaaaatgcacttgtcctacctgagattctccattctgcttggtgaggcaccctgatgaggcatttcacatgtgatcacaggagatgtcaccaggattattctgagttttaatttagtcggttgtaaatggggtcatgataattcatcatcttatgtggttgttagcatagttaaaggataaaatgaaacaaagttctttgtgtgtaaatattagctattgttattattacccccattgttagcataaatcaagagagtgtctgttctccacctttcccttctttaatggagacactggtcactagatttaggacttaccccaaaatgattttgtcctgaaatccttaccttaattatacctaaaaagttcatttttccaaatcaccttcacaggttttctcaggcttaagagagtgacatatctttcagtggggaaggggcacaattcaacccactatggggagttagaagttaagcatgtaaatggacatacattattatgtaatgccaagtagtgataaatgctctaaagtaaaaataaagccatataaggggataagggtgagtggaggatgctctttggagacagcagtcagtaaaggcctcctgaagaggtgacatctgagctaagatgtgactgagagagtgagacatgcaatatgggggacatgtgttagaggcagaaggagcagcaaatgcagagagctgagccaggaaagtcaagaaaaatcagagtggctggtggcacagcaagtgagcaggccagcagcagggaaagagagcagggggctgtgcttgtcacaagaggattttgcattttattctaggtttgatggggagccaagactgggctaagaacagcagagtcatattcaatttctaaggcagacattctattttaaaccaaactccagacgtggagctaaagatttaagtggtattataatatcctcgaataattgctctgataatgagaaaacaccaagagcaattctttgccaatattagaactaaattcagtttgtcctaccatgtcttttcattatcttgtgcttcactgaacatgtcacgagtttgcagaaacaattccttctgcctgcatgcccttccccagtgtgccccctcactctgctgtggcttgtccctggtttgtgtcacgtcccccagataaggtcactcacacttcctccatgctccaaggcgcttattgccctgggtgcctactttctcctatcattaccatctgtttacaagccttcctccttttctgactgtacagttctttatggtcacatgtaaatcttattaatcttcatattaccagaaactagcacactgcacactaggtactgaataaatgttaaatgaatgagtgaatcttggtcctattcaattttattttgcctgggtttatatattctccatcccactatttaaataaacatagacttttttcttctgttatttaatgaatagcctatagaaaggcattacattagcatcaggacacaatgaccatctaaacattttttaacagttcactagaactgtacacagttattagcctgttctttgcttgcaaatgcctcaagaagcgaaatagtggtacgtcctttcccctgtgttaaatttgagatcacagaggcagggcaagctgcattaacctgtctgaggtcaccctccaagtcactgcaatggagaagccaaatcatcaatgcagagagctgctttcttccgtaactgtgatgtactgagttcactgagccatgctgtatttgtcatgcacatgagttctgaaaatcaataaaatctgtgaaccatcccacaaaaataaaatgcagtgaaaagagtctgctttgctcccttcaattactccagcatgaatggacccaacagctgtggtcttcagtgggacttccagggcaataaagtttttagaaatattgattttcttgatttatcaaattttcttgtttgagctttgcctaataaaacatcaaagttgagcatgtgaagctgcattaaagcatgatcttcctggcaagaagaatatggaataaaattggttgcatctttggatatgaaatagaaaaaaaatacctgaatcattttcaacaaaacatatgctcaaatactggtggagataaaaaccagttcaggtagatttctttgtcatgcttgaaaaatacttttcttcaaatacatattaaatatattactatctagagcatctaaagtgagagtctcttgtcacacatctagacaaaattaggattcctgtgactcatgtccccagtcattctacattggttgtcagagttcatatctcaactccagattcaggtccagtttgctggtccatcagaggctggaagcatgctgtgccagctgtgtctgtagacacagctgtgcgctgtgaaaaatgcacactcggttaaccctggaatgattttagatcctaaatattgcaaaggaaagagtatcttttggttttttgtgcctcaatatcctattgacatgaatgaattttgcttgataaatttgtaaagccaacagcctttcgacaaaaggggtgagaaacatatgtgtgttttgtaattgagtaaaaatggattttgagaatactatggaatattcatagattattggctttcgagttggaagagcaatttagggataattataacaatcatgataattggtgaccatttttaaatatggttctgccattgtatgatgtgttttatcaacaaatatattaggtacatgattcagttaacactacatccaatttaaagaagaggacaatccattctagaggagttaaatgacttgccccattcccacagttgattacttttcagagatgaacaacaaagtcaatgcttctatcttcttggtttacaaaggaattgcaaaccaaatttatgagagtgattagccttctcaaggatgacatgggactttgtcttttaaccagatgattgcagaagtgattggccattattgcttcctcaaacttctagttaccttgaaataactctataggacaatttattgctaagaatcttctatggaatactacttcaaaaatacatcagaggccaggcattgtggctcatgcctgaaatcccagcactttgggaagctgaggcaggcagatcacctgaggtcaggagttccagacctgcctggccaacatggtgaaaccccatctttactaaaaattctaaaattagccaagcatagtggcaggtgcctgtaatcccagctactcaggaggctgaggcaggaaaatcacttgaacccgggagatagaggctgtagtgagctgagattacgccactgcactccagcctgatcaacaaagcaagactccatctcagaaaaaaaaaaaaaaaaaaaaaccagaaaacaaaaatgcatcagtagacgttacttaaagctatataaaaatgttgttaaagaaaatgctgagttaaactaaacatattactttactgtaggacttatcactaccatgtttaatataaatatatgcattgcatatcttccagtagtgggtaccatgtggagcacttactaaatgtgtttcgtcatgtgactgttttatctgttttctcttaaataaatattgagtgctttgcaacacaaagtttagtgctctacggagatgaactttcctagagttaatattcatcgctagtagactatactgtgacaaaaataatgtaattactttgactattttccaccgtggatattaccggaatcacattatttcacagtcattattaaaatggccagaaagattagaaaagtaaaatacaatattggaaaaaaatagaaaactgaaaattgccaccatatctacttagtctttgacatggctatgtaaaaaacattggtcctgtatatggatgaacctcatgacttctgtaatattttagtggtgattttatgaaaacattgtccttttctaaagtccctgaaaatcagttttgtatcttcaaattagaaagctggagagagcaatgcgtcatggggttatggaagagagagtaggaatctggtcccaagtgaattcaaatacaccacttgggtcccattcatctactctctggcccatggtaccaacctggtccttccatgaaggtgccttttggagacagcagaatatcctaggcatttgcttcaattttccaattttagacccaaagtcaaatgtttcccaaatgatttaaattgatacacataggccactggcactgggatttccatttccttcctgggctttgtaactatagaaaaacaacttacgaaggaagatgtggggattcttctaccacaggtagtcaggtagacctgtccccagagatgaagaaatgtacatgggatatacgaatgaagggtgatgggaagggaaattgaggttaatgctgaggtttctggctgagagtctgaatacagtctactgtgagcaaaagtggttatggtgctttttgatttttaaaagttagctgagaggtgtgccgtggccagcagtgttggtagccagaaacttcccgtaaaccagagagcacactgcatccaagggctgtgctacaaatcagctttggtatgaatttaggacatttgcaagtattatgcctgttaccttaaatgggatttaggacctggtgcagtggctcacgcctgtaatcccagcactttgggaggccaaggtaggtggatcacttgaggccaggagttcgagaccagcctggccaacatggtgaaaccctgtctctactaaaaatacaaaaatcagccaggtgtggtggcgtatgcctataatcccagctactcaggaggcttaggcaggataattgcttgaacctgggaggcagaggttacagtgagctgagctcacgccactacacttcagcctgggcggcagagtgagattctgtctcaaaaataaataaataaataaatatataaataaaacaaaataaatgagattcagtctgtgctttttcaggatttaaatttgccaaaagaaattgaaattatacattgctagtctcattagagagttctgtcatattaggtgacactaacaagaaaaaaaatccatgtccaaaggctaaggctatcaggagcatctagttacaatgatcaaagtgatgattaaagaaaaataactatttcttgcctgtttaaagccatgccattacaacagactaattgaaatgtgaagcaaagattatgtagattttgcttgctggatgttgtaatgttaagactttattgatcaaaaagaggcaagtagcttttgaactgtattagcagttcttctactggttggaaatttattttctgatagtgtaagttaccagagcttcatcatgctgtgaagtgtatttcaagtcaaaaaaattaaattgaacccataatgcataagggtctttgtgccttgtaacctagtgaataagaacataggctttggaatcagaaccaccttaatttacatataaacttagccattgttttgaaaaagacaatcaagttttctaagcctcagttttttcaactgtaaaagtgggatattaacagccacctgaataagtctatttatgaccaaatggaatgaataccaggccctagaccagtaagtaccacataatcatcagcaaataaattggggaaataattataataataattatcacctctctgtcgggctagagtggaacttgaggttcatttaatccaagtcttacaatttgaatgaggacactgagtcacaaagtggaaacagtttcaaagtgcttttattcattcgatgatatattgtagaccccccatttgtcaagctctgtggtaggtactggcaaatgaaagtataagcattcaccatatatgcattcaccatgtatgtattcatacccagacccattcaaggactaattgatggcatctgtcccttaaggagttcggagtatacagaaggacacacatggtgaattttgtgctataacagagggctcaacaggttgctgatggaagaacagaagacaccatgactctgccaggaaagccacttcagagaaaaggtggtaacttatggggtcttgaaggaagaaaatgattaatgtcaaccatacagaccttctagactatgcagagaaagtatcaaccatattttactaatgagaaaaccaagaatttgaaaaaatgtattattagtcgatggttccatgatattttaggggcagaaatggaactaaaactcagggcttatcatctgtatctcttactacttctattctttctcccattctctcacatgaataatatctaagtttgcagaaagaaattagttcagcagtttaattacactgtggataacttttaatttattcatttctcatggaattatttcctcttgcttgatttatgcccttacttgatctatttcattttactttgattttcccctttgtaatcagatgatgcatctttgataatatttcattctctttctgtatatagccatttgtttttctccccctggagaactaattcatatatattctaaaaataagcaaatagtgtaaatgcaaatgggcttcaaatgatactttacaagcgcctaaattgaactttgtttcacttgtatcctgatgcaaaatgttcctaactttaagatcatctcccatagggccattccaattgtaaaatgaactctgcatctgattttcagattattggatctacatatttaccataactctgattaaaggcctttgaagcaaatggaccatagctgtttttgcaattgagccttattaaaatttaaagtgtatccgtaaacatgtaagtgcctattatagatcaaagttcagaaaattaaatattcacaaatacagctcattttacaaaaactacagacttgaaattatctaagccaaataatcttagcacttaccacaaaatagccttagttatttcagcagcaagattttatttatgttaagcaactttttgtgacttgagcaaaggttttattttacctggaaaactcagcatatatagctcttactcatggaacactgttgtaatattaagatataaaaatgataaagtaccacctcacattatatcatttaatgcatcagcaatgaaaccatttggggtttatttattttgctgattgacttgattcccttcctttggagaggttaataaagttgggcatatttcatgattattcaaataagatagcaaactttaatttctgtaaccctctaggagggttcagccaacaagtacaatactgtgtgctgttttaggatgtttagattggtgcctccacaaatgaaaaatgaggccttgtatttgttgatagcaagtagattgtactgcagaattaaaaggaaagaaatcaatgctgccaaaataaaacaatacaattagaaccacattttgacttgtctcagaaacattttttggtattaaagttattgggctattaaattgcgtggggaaaaataatagagctcattacatggagtgttctgctttgccacagctggagtctggattgcacactttaatattacttacatgtactggagcaagctgaagaaatacagattattaagaaataaccttttccattaggggagcttcaaagtcctcaggaccttttgggggtattagtgggaatataaagaagaatgaagtatctttttgccacgcattttccaatgtgaacaataaaatctattaaaaagtttgtttctgtttcaatatatttccctgatagaaagaaaagaaagagggagtttaagggagaaccgattaaagactaaaaatagaagggatggaactacaatttccttagatagcattgagacagacaactctgtttgatcatttaaggccaaagattaaatggtaactcagaaatttttaattatttccctcaacaataatttcagaaacaactcataggacttgtctttttacttgtggccatttaaatgatggtgggcagcagcagttctattgtttttccttattttggggagtggaccggttttatgcatactgtcttccactaaaaaaatcagacaaaaaagttaaaaaaagctgttaaggcaattaaattacttaccatctttactaaggaaagaatgatagatgcatggtaattgaggatttacctagttgctagggatggcagtaagagtttcacatacattacatcctttaatcgttcataaatcacttattttttggataacagaacctatccttgctttttggaaaatcacattgccttccacattgttcatttatgagaaggaccctgtgccctggctcaaaaggtaaacgtatgacccagatctggttaatgaaaacactgtggcaataaggacagacaattaggatgtgattatagcttggtcagggtatagaattctgggacttttcctgaaactatccaattttgagaaaaatcctctggtcatctactgtggatctacaagtagcaaaatctttctcttcctttctgtctctccatttgccttcttctgccctttttagacattctagtaactagctcactcaccatgaaaacaactatgaaagagtcatttttgaatacaaaacaaataaaccaaaggtttaatttaaaaaaaaaattgctgaaccctgggatacataagactgccaaaatacttattaaaacatataagcaattctaaaggagtcagaatgaatgcttagagtttaagtgactatcatcaacatttaatttaccgaggtggatgtgccattgaccactgatattaaagagccattaccaagaatgcacatatgagcacattacatctaaatggtcccttcacctctttctggatagcttgtgggaatcacttttaactatgctaattgtttatgccgagtaaacattcatgcttaaatgcctccaacaaaataacatgtaacatttgggaatttcgtggtaacttgatgacttttattatcagaaccaaataaagaacacatgtttattgcatattaaatagaaatgaggaaaatttcttaaccaaaacaaaaactttttttaaaaactgtagtaaactgcatattttctagaaggccaacaacaaaagcaaacctctctttaataagtattttatgttataaaattggaaaatttgtccacacgcagggatttaaaattgagttatcaaattccagattttaaactaaatatgaaaaagtgttgtgacctaaaaattatttcaagcttaagataccaaagtgaacaaaaatactttcacatttatattccacctctcaacactcgcgtaaatacacagaacccaaaatatcttttgcaattatcttaattactgttacctttgatttatcttacaagggtaatgcatttaaaattgtaatttctcattaatgtcagttaggttttaaaggattttaaaaacattacttctctgttggttggtctgatgttttaaatatgtttgattcaaataatacagatgttataactaaaggatcagtttccatagggccataattttgcaatgctaataactactagattttttttaaagataggtatttcccacaagcacatttgtatatattggcagaaggaatggatatgttaaaaaatgattcaaacacaaatggtttccttcaacttaatgttttaaactttctgtgtgtttgaagcatttctccaaaaacatgatgatggaacatgcattggaagaagaatcagaaaagtcaaatttttacataaagtctgttaactcctttgctgtgtgaatattgacacattgcttaacattgcttaatctttctgtgtgttactatattcaaattgggaattgcattacttgcattacatatctttccacaatttatatgaaaatcaaatgggataacagatatgataggcaacgaaaattccaaaatgctaaattaatgaatgggtgctctgttcatcacttaccaatctaatatttaatgagctactactcaatatatagataatttagaaaaagtactcaaatatgacagtaggagagacacataaaatatgttaagtcctataagaaaggtttagttcaaatgctaagagaattcagagacagggaaagataattttgactgagagagaggactaggagggaaagtagaagtgacgctatttgaactgggtcttgggaaacactaggacctggatctcagatgagaaaacatgttttaagtaggggaggagataatggatttgaaggtttagggttatctattgcctgttttgagtgcatgatataatgcatttcacttcttcagttaactaaaagaatcacgtaaattgtttaaaaggagtagaagatcttgaataatcatatacctttttactaagcaattaatatatctaagacattgtttttatctactatctcagtgttgtgatatgagtattattgctattatatccattgatagattagaaaattgaaattacaacaaaaattacttgactccaaaaccacggatctcccctacatcctgctctattattctcttgtaaaatagattgtggttctttttatttctgtaacttaaaacatttttccattgatgtcattctttcaactacacgttgagtgcaaagatgaggtgcttgctctcaaatgggaagtaggaagttgaacagagttgtccttcttccatggatttaatgaggaattaagattcagaaatgagctctcatgtgcacctatccagccctccaacacccactcctcaatggactaaatatttaacctaggtggaaaagaactcacacattggaggaggactaacatgtgacttcctttgcacatgacccaggatcataagtgggggaccttctatttgctctttacattcagtcttctgctcattgtcacatatgcccatgatcttaaaagcaagccactagagtgtgtttctaagagcatagctataattcagataaatgtggagaaaatttgtaattccgtgtcttagtctgtttagtgttactatgaagagatacctgaggctgggtaatgtataaagaaaagttaatttggctcaccctcccacaggctgtaaaagaagcacagcaccagcatctgcttatggtgagggcttcaggatgcttccactcatggtggaagggaaaaaggagctagtgtgtgcagaggtgacgcagtgagagaggaagcaagagagagagtggagatgccaggttctgttttaacaaatagctcttaagggaactagcagagggagaactccctcattaccacaaggacaacaccaagcttttcaggagggatctaacccccttgagtcaaacatctcccccaattaggccacacttctaacagtgaggatcaaatttcaacatgaggtttgggttgggggctaatatgcaaaccatagctttcccttactagcagagtgacccaaggcaagttgcatacaatggagataaaaatcctgtgttaatcagcttgggctaccataacaaaataccatagacctgttggatcaaacagcagacattggtttctcacagtttcagaggctgagtagtctaagaccaaggggctggctaatgccattctgcgtcagggccctcttcctggcttgcagatggccgctttcttattatatcttcacatggtagagaaaaagtgatctctggtctcccttcttttactttcgaaagtgctaatctcatcatgggagccctaccttcatgatttcacccaaatctaattacctccaaggagccccacctgtaaaaatgatcacattgggtgttaaggcttcaacatacaaattttgagacacaattcagtccatggcaaatactgtagggtagtttcaaactttcataaacataaatatgtgaactatttagcctcaaacctggcatataggtacattgaaatggcaactatttgtgtcatacggctattcatgttttacatccacatagtaccatctcctacaacattcacctaaagcaactgattggcaatgacattcattacagatttatagctattcaataatcatttacagaatactctgtgtctggcactgtgttgggtgaggagaggagaaagtatataaaaagttgagtaatttaaagctcttatttttgaaaaactcatagaaaaatgaggagtgcagagagctctaaagagattgctgaaatataaaatgggattagaccatggggaaaactggtgactgattctgccagaccaaatcaaagaaagctttaaagagaagtgatgtttcaagcagctctggatatccaagtagaatttatctgccagatagcacaaaaaaagaaggatgctctaagtagaaacaatagtatctgataagcagggaagcatgagcaagcaaagaactgtagggaaactaatgggagacaggaattgttggagcaacagtcacatacaggaacaggtaaagaaacacagtcaatgtcactgagaactggattgtgagatccctctgattccacaatcaagagacagggcggagccgaaagtatttttaatttaatgttggcaatagtgtgaagaatgagttggtctgggatgagacaggtggcaagaggccagtcaggacaccagtgtcacagtctctagacaacaggtgaatagacctattgatatggtttggatttgtatccctacccaaatctcatgtcaaattgtaattcccagtgttggaagaggggcctattgggaagtgattagatcatgggagtgggcttcccccttgctattcttgtgcggtgagtgagttctcaggagatctggttgtttaaaagtttatagcacctcccccttcgctctcttcctcctgctccacccatgtaagacatgtctgcttccccattcgccatccaccatgattgtaagtttcctgagtcctccccagccaagcttcctgtacagtttatggaactgtcagccaattaaaccttctttctttataaattacccagtatcagatagttcttcatatcaatgtgagaacagactaatacacttatacaaggcagtagaggtagaaaggaagagacaatacttagagacatttgggagtaagaagacttagagcttccatttcaggtggattgagagatttactcctgatgagaggtcaaaggattcctattgaaccagacatcagttgctggggaacagtcatatgtgactgcaacatcaaggaacccacaaatgcagcctcgcacacatacaggacataaagccaaactgcaaaaggtaacacatcaaaatacctctatattgtgtaatgccagatttgtgtaaatcagaaaagaactgccaggctcaccaacaacctcatttatattacggtaactatcaataccgaaaactgttatttcctattatatttttaaaaagtcaaattaataaacttcaattatgaacaaccagcatttattaattatctcctataatcactatgacaaagatagttaattccctgcccggtatatatgcttgcttctactttaagaacaaatccacaattttattaagattagcaagtacccaatttaataaatatatatgtgtagatctatatattatatagatatgtgtacatttgtgtatatatacacatacctatattttttccttctctcatgaagctaggggtggccaatgagatatgaatggaagccactggctgatgtatctgaggacctctttataggggtctagacttatatggaagggggcccattgtcctccctgccaccccctctttcttgcttcttggatgaatttgtaaaggccagaactcatgaatagacacaagcaccaatcttagtagaataaaacaaaacaaaacaaaaaaccttagtatacataataaaaatttaacactaagttgtatcagctaacactatttggattttctgatgtgtacaatgcaacctaattaacatgtcatatagccagcatcatgcttagagccagggaaagcaaagataactaaaatacataaaccatctgaaataccacaggatagggaatataactttaaaaacaatacctttccattccccacccaaatagtctaatataaactgaaaactggatgaggatggaagttactttgtagtcacgacaatattgagtatcctgaggaatcagttctctatcaagtagcgtgagtgataactcatacctcatctcaaagcttaacatttttctaggtaccagtggggcagaaacacatgattcctagtcccaaacagttcacaacgcagaaggggagccagaacagtacttgataataagtagcatatatttatggccatagtcagcgctgctatgtagtttttaattcaacaaatattccccatgataacttgccctgagggagagagtcatgagtgtgcaacaatattgccctgttttcaaaactaggttttgagggggaggataaatagaattcaaatcgtattataatatggtagacttgtgtgaacttaataagtgacaatcctggtggaccccaaattcatgtgttgagtttctaatccctaccacctcagaatgtcaccttatttgaaaataagatcattgcaaaagcaatttctagttatgatgaggtcatagtggagtaaagtgggcccctaaaccaatatgactgatgtccttatgaaaaggagatatttggacatagacatatacacagggacaaggctgtgtgaacctgatggttgatattgagtgtcaacttgattgaattgaaggatgcacagtattgttcctgtgtgtatctgtaagggtgttgccagaggagattcacatttgagtcagtgggctgggagatgcagacccaccctcaatctgggtgggcaccatctaatcagctgccagcataaaagcaggcatggaaagagcagacttgctgagtcttccagccaccatctttctcctgtgctggatgcttcctaagttcaaacatcagactctaagttcttcagctgttggactcttggacttaccccagtgctttgccaggggctctctgtggcctttggccacagactgaagactgcactatgggcttcccaacttttgagttgttgggattcggactggcttcctggctcctcagcttgcagacagccttttgtggcacttcaccttgtgactgtgtgagtcaattctaataaaatcctcttcatatattcatctatcctgttagttgtgtccctttagagaacactgactaatacagtgaagatgaaggaaaaactctgggtaatgcttcttcttcatggcaaggaatgtcaaaaatggtcaataaaccaccagatactagggaagaggcatgggtaagatcactctcaccgcattcagagcgaatcaaccctgctgatgccttgatctcagattttgagcctccaaacctgtgagacaatatattcctattgtttaagccacccactcaattagcaatactttgttcaggctgctctaacaaactaagacaagctttaatggagtctacaagtttgttgagacatgtttaagtcccatgcactaggacactgatattctaaaaaaaaaaaaaaaaaaaaaaaaaaaaaaagcttgattgacaagtaaacccagattttgttgaatatttcaacataataacacttgaaagaaaataatagaaaaactttgcttcttgaggaggaaacagccctgttctaaaactgcttaccatgagtgctagtgaaagaattataaagaaagtacagaactttagtaatttgatagtagaatattatgaatttgaggattcatgacattcttgggatacattttagaaaaactgagaaagggcttcctcacatagcaaaggaggtaaaattcaaaaatgatataaaaataagcactatgagaggataaaagagaaaaagaatacattgtgggatcagaaaaggaggtggcatttgagaagaaacttgaaggatgttctattaatcagagtctggtgttttagacaaagtctatttaatactgaccattggttactcgggtgattaaagactgaagcttctggggatgttgatgtaacccagagctcaacagctttaggaagttgctaccattcttcaggccagcaggggagaaaaaaagaaagaatgaacgaatctgaaaggagaagctccctgcagttggtagttggacctcttagggaaaaaaagccattgtttcacacatactagaccactgagggggcctggctgtttttttacacatctcagaggggctctgctgtgtgttgggagaatgggggtgggctatgtggtactccccccactcaggtaaagtgacatcagggctagaagtgtcaaggaagttggaggctgaagccatcgttgtctgcctcaaatggagagggagacccaacctggaagtcagaaaagaatccttcttccaacttccacctcctgtccacatttcctactggcaaaatctacccagagatggctgaaaatgggagtctggaaaatgtaatttttggaaccttaatcctaacttctcagaaaagagtaggtggtggatagcggtaggacttggaactaatagccaacaggtaaaagaggcagagatgtagaggttttaatgtaaagaaacagggtgaaaaggaggtatttcccgtttcctgaaggccctgagcattggtaaagagtctggaatggaaaaggacagtttggtcaataatggtgattccctgatgtaggtcagaaatgggtctaggtgatagaaatgttaacgtgaacaaaatatacaatagctgtttgtagactatttaatttaaccttagcatcaagcatgtaatataggaagaagtagaaaataagtctaaaaagggaggacaggagcctagaactgcattctggataacttgtggcatccatatgggagaaggatatataactcaataaatcatgtttaatatcagtggcttttgaaaatgagtctgaagcatgtcaatggattaggaacattaattcagagggtttatagaatagattcacttttcctaatagtcaaagttattattttatcattttcatcattatcattgtcatcattatcataattacaatgtttatccagtactcaatatatagcagaaattgagcactttcctatatcacatcgaaccctccaaacaacactatacagcagctgttattttccctattttatatgggaagtaactgaagatcaaatagagtacatcttttggtcaaagtcatattggttcgacgtggttgaacctggattcaaactcaagtctgaccctagatttctttctcttaagcattacatgcttctccgtttgagaaaaggacatctagactcacatctcctttcaaaatattgtcatccatgaggtcacctcaagactcaagtgccacctggcagcttgagccatttctctaagttcttcgttcagttcatttataatcccctctgagtgttacttctccgccttctcacttctttaggtttgtcacagtcctctgagatgacaggctgagcaatggtgatgagaattatggtaatataaattccataaacagaagagtctaccaggagtggacacaaagaagttcacagagggcgcatctgggtgagaacagccccagctgttatagcatatgtgcaaaataatgatgtgcctgcacatccatgcagacctgatcctagctgtttataagaaaggatagttaaatgcagaaatgcaaatctgtaggctggagttgctctgtttcctaagtcttaagagtttggctccttatcttacacacaaaaatgcaatagacaaaacctccacataaataagcagcaggtgaactagcattttcttgccaaggtattatgcaagtgttaactgagctgatcagcagaagcacatatccatcagtttcactgcagaaagcaggaagaggaaggtgaagatgagcaggcaagttaaatgaaaactcatctggcttgcagaagagacacttattgctcagaggaggaaggtgcccaggggtcatgagatgtgacagtactaacagaaaatcctgagcttgcaaactctgataaatgtttaagatttaatggggagtgtccacacaaatgcaaaatgatttagaaaaaggtaaatgatcataacaatgttaataacatctatcaagcactttgctgagtattttgcttacattaataccccattatctaatcaaactcataggatatgtatggcacactatttcattgaagaaacagattcttagagatgtaaagtaactttccaaaagtataggtattttagatatatatattatagacctagcaaataagatgcaaaaatagaatttaaacttagaactgcctaacttagaaattactataaccaaatgctctacttcacatcctgattgctggggattccatttgaaatagccagatcatatataagtacatatctgtacacagaagtacatctatttctaaaagagactgctacttgtcaaatagtcaggcaagtatgtgttttggctctgtgatgtgataggaccagttttgaatctcctattttaacaaaatgtgttgcttatttttgttattttacatcatggaaacttagtttgttcagcctgaagagtttatgatggcctcctgtattcttcctgtaacgtgttcaaattctagggtaaaataaatttaaaacacaaacccaggatgtgtccttttaagctcttataaaggatatcatgtagataagccaataaaaaccacaaaactcccaatttggtcaaaagggaccttactgtattaatatatgcatcctaattcatgcagtcacttaatttctcatcatcttccttctaaacaccattccatgcacattttatatagcaacattgctgaaaaaaatgcatggatccacaaagatctctcatcttttttttttttttttgagacttgctttgccacccaggctggagtgctatggcatgacctcagctcactgcaacctctgcctcctgagttcaagtgattcttgtgcctcagctcccccaagtatctgggattacaggcatgtgccaccacacccagctaatttttgtatttttagtgaagatggggtttctccatgttggccagactgctctttaactcctgacctcaggtgatccactggcctctggctcccaaagtgctgggattataggcgtgagccattccacctggtctcatccttcttttcttgcctttgtggattctgttctctcatgatcttttccctatctcttagttgtactacaagattcagtttggtcttcatcttttcagcaaactttccttgacttaggtattagtgtccatctcagctattcagaatcatcccaggcatgttattattatcaccactgtttagtggtaaacagtgggaatggtcatagcattagcggtagtagcattagtagcagcaacaataatggaagaggtagtgatactcatacttgaccttagtgagtatctccaatatgtcaggcacagtaccaggaactttaaatgtatgaactctaatccactaaaactacatgaatcagcatgaatttattatccccactttatgactgagggaaactgagtttctcttttatcagtggctgtttctccctaattttctgttttcatgctccccatttttctctcttaagcaccttagatatttctttatttatcttgtatttgtgttctattgtttctcagatttctaaatcattgatttctagttttacccttattaattctgttctcgttccttgggatttattttttttcttttctaacagtttgaacctaattgcttaattcacttaaattttcccattttattaattcatctatgtaaggccagtaattttcctctgagcaataccttagctgtgttctctagtacctaaatttatattttatctattctgagacacaactttttaaggtcatttcaacttatgacatattttagaattaagagatatcttcatctaggggtgaatgatatgcatgttagtacactacgctccattttgatcaatttccaatgattatcagccaggttacagtcctgacatagctgataactaatgttggaaactggatagactgggacattgttcctgttggcttatgtgccttattgatgctgaaaagctaagtttagttactgtttcaaatacctttattttgttgatctaaaatattctatgaacactttccaagaagatctacctttaaaaatttcaaaatgggtgtcaacggcttggaagagaatttgggagataatagtggagcactctcccaactcaggctgcaatactaatgcacttagtgtcacagtaggagaaaaattctaacgactgtaacagagttgagtcatggtttatgggcagaaattttcttgttaatgaacacaagagaaccatgcatcttacaaatggtggtgtcttagattaataaaaaaattaatatttgttttctgtaagtttatcgtgtacctgaaatttacaatttcattttcattttcattttgacctatgggcctttgagcaagttttcaaaatctccaggtgaaactggcgtttttcttttcagtttgtttttaatttccagctttcttgtatagagatcaaagagagtgttctatatttatatatttaaataatttattgaggtttttgtggccttaatatatggcaggtttaatcaatgtttccaagctatttgaatagaaaaagattcccctcttttgaagaaacggagtccttatatacttacaggagatgttcggcagccttttatttaaatggggtgataaataaaataaaattctaaaatcattgcagaaggtgaaaaattaaagaaggatccagatttgaaggagactatagtctttagtagtcaatagtgaaccctcaaattgagagtgtaaggcagagtgtacacttgaagagctggataatatgaaccaagactaacagaagctaaaactagatttcagagtgaaatcagaaagaaagtatcttgacaacaaaataatgtcttatgcctagtctctctactactcttgttctcaagtttgccttatttcaacattcccagtatttctgtctttaatttttaccatttttgagaatctgagaactatctgtactattattatcctgacaactttctccaaatctattttataccaattcactctcacttgttatgtagctttgcatttagtaaaaatatccatgaactaatggaattatgtaatgtgtatgtcattatatatgactgtttttaaaagtttgtcaacatattttctagaagaatctcactgatcctttgtacaatactgcataacttgtaaacacttatgctgactccagcctctgtgggagaggaggtgatcttgccctcaaactgacttcagggaggtcagtcacaaaggtgacagctgggtagccatggagtttaaactaagagtcacttgaaataagtagaagtaagtacatcagaggctagacagaacacttgaatcaagagtccaagatgatttggaggttttgagataggaaagtttagggcacatcactttgattttgaattgagttcaatagttcctacattaggggttggattttcaggaacataagaaggaaaatgtttctgcctattatttcttatacctaaggaacaactgggctattgaatgagaataatgtccaataccttactgctgatacttcctatttttctccttctccttatcttttccttcccctccccttcttcctcttttctcttcctcctcttccttttctttctttagctaacttcttagtagttatttagatacacgttttctgttatctgcataatttgtcatcttcacaagattctacattcatctctgaatttattgtactatactgagactcattctcaaatatttaaatcacattttatattgcaatcttcgtgtgatagtttataacaaaccaaatttatttcaatagttaattatggaataggtagacagatgctgctttgatagtatgaaaagtatcacaaattatattatttcaaaagaaaattataattaaatgtcagcttccaacagtcacatacaaatctgcatatgatctgccaatgcagacaacccttagaatggtcttgaaaatcccatattaaagatgatagagtcatcagatggaaggagcttggtcccctaagtcatcacttggaagagagccattcatttgcgtatacttcttagggctcacaggtgagcaagaaaataaactatttggttaaacaactgaaaatttttttagtttgttgctcacaggagttggcctattgtgtgaggcttagcaaatatcggtagaatgacagactgagtcaataagtaaatgctgctactcaacatttgtttctgcccatagaagcctaaattttttagtggtttgtttcttgtctccaacttaaaaaccctgacattggagattctaagaaatcaactgatttaagactgcttcacataaagcatcttttatggggtgaaaaccaagaagcataaaagcccactgctctgctatatgacagttcccgtaggtataacataaaccaaggtcacgtcggcactaagccagagcacagtattttgcattttctgctaatgccgaaaaacacatttaaatatcctgttactgaaaaaaaatctaaattttctttgaaaattttggataccaaagtagaaacattagacctcgcttgcatactgactaaaaatcaatgccctaaaattgctgagtgcactcagaattatttgatatgctgtccaaacttgtttatgaaaatatattttggatgtgaggtataagtccccgattactcatttatccaaattgctaaatgtttagaagacttcaaagtaatttaaattattccttttattgatttattactttctttaatattcataataacttttgctcttaaccctgacctcataacatttgaagtgctatgataataattatcttatattaatatgctaatttcttcaaacagtacattcaactgaaacttcttaaggttttaaccactgtagacttaattaggttaattaaaatactattctattttatttttactttgtgattgctccattatcatataatgacactcataatagtaatagaatttattatttattgagcatatcttttcttcctaaaacattagttttatgattaacttcataaaaaaattaaataggtgcataccctgtgtggttttacctattcttttttagtttaataaataccaccccataaatgaataccaacttatcttccagtcatatatagtattaaacctaccaaatctatttagctaagagaaatttacttgggcttgaatatgctatcctggatgctacactgtgacttcagcctaaggagtttcccctgtctgaaaaacccttgactctaactggacagcaatagtaatctctgtgccaatttctaaagaggctgcagattgcaagacacctcatgatctggccttgcacaactcttctgccctctattacttttagaactgcaattccagctgcgcactgtggctcacccctgtaatcccagcacttttggaggctgaggtgggcagaccacctgaggtcaggtgttcgagaccagcctggccaatatagcaaaactctctctctactaaaagtacaaaaaattaggcaggcattgtggcaggcacctgtaatcccagctacttgggaggctgaggtaggagaatcgcttgaacccaggaggcggaggttacagtgagccgagatcgcgccattgcattccagccggaataacaagagcgaaactccatcttaaaaacaaacaaacaaacaaacaaacaaaaaactgcaattccataaatgcagtatattctttggtgcctctatgccgttgcacactctgcttcctctgctgcagctggcattctttgccttgaccacctagttagctccttcctctatttggaaattctgtccagaagatacctttcattcctggtgtcatcatttggtattttctcttttgcttgtctctgcttctgtcatcatgtgctacatcctgctctccatcatttactagtattcattttatgccagccactttactattcttacatatattctggagaattgttttagaaaactcacaagtttaacattgttatccacattttagaagcaagaaaaactaaactatttgttcactctggctaatgtgtagattattaagagttcaggccgggcgcggtggctcacgcctgtaatcccagcagtttgggagaacgaggtgggtggatcacgaagtcaggcattcaagaccagccttgccaacatggtgaaaccctgtctctactaaagatacaaaaattagccgggcgtggtagcgggcacctgtaatcccagctacttaggaggctgaggcagagaattgcctgaacccgggaggcggacgttgcagtgagccgagattgcgccactgcactccaacctgggtgacagagcgagactccgtctcaaaaaaaaaaaaaaaaaaaaaaaaaagagttcatgctagctaaatgtgaatttctcctgaattctacctaaggtctgtctgcttctaaagcccagtttttatatgctcaggtaaatatttgcttgtttccagacatatgacaaaacatgggcattaacaaaggagaaaaagaaaaacggagcaggagagagaaaataagagagactaagtaagaaattttaaataatttaaatatggcatccacccttctactcagtggatgaatgaccaagactgcattagaataaagcaaatctgctcatccgtgccatctcaacccctgggacctcatagaatgtgagtttcttccagttcgagtataatgctagtatttaatcacatgtgtttcttctacctcttggcaactgagggcaagcaaatgacttcgtcttgtactcagttaaagaaacagtgaccttttctgagcatgaaggtcatacatcccacactggactaactcaggggcagtccttctctgtgatattgcaccttcttaaagtacatttgtcttgcatacggattttagagaccaattgttttgcatgctgcaggtgcttaacaaatatcagtagaatgacagactcggtcaataaataaacgctactactcaacatttgtttctgctcatagaagcctaaatttttttcgtggtttgtttcttgtctccaacttaaagaacctgacattggagattctaagagatcaactgatttaagactgcttcatataaagcatcttttatgcggtgaaaaccaagaagcataaaaacccactgctctgctgtatgacagttcccgtaggtataacataaaccaaggtcacatcagcactaagccagagcacagtattttgcattttctgataatgcagaaaaacacacttaaagccacagtactgtttgaatagaacacaagtacaagatgagcctacgagttcatccaaaataaataaaactactgtggggaaaagttgatttattaaatttctttcatcccagaagaatatattaagaatattatttatatcctttgcatatcttccttctaattagattcccttgtgccatgttaaaaattgatttaatcttatttatttatatcttatttgtaaactgcttgctatgtaatctattaattgctgtttcaattaaattctatatatccattcatgcatttgtttatcctcccatggattgtttctcatcataactctacattcagaattctggaggcatttacccactgggagcaactaccctcaaacaccttgctttttattgctgaaaacccttgtactctactgagaataaactactgatactctccatgttctcagagtaaatggataattcagtacagttgaacacaatgtaattctaggttttattctccataaattgccttttagcatagagataaaaactttatttaactaaatgtttccctttatcctgactcatgtagcagaacaagaatatataacacagtaaaaattccttttgaagagtagttttttagctgatttggatgctttccaataaactcagtttttcacagaacgcttaggtaagtagggagattcattgaacattacaacgagaattatcaatggaccttaactacagctaaatatataatttccagttgtaatataggtgcccaaatatgtgttgaaataaaacatatttacttgtgtagttaaggggtaatgtctatataccactgaattttactagccatatctatgaattttatctagactacttaaacagtatcagggttctcagtgtatgcgttctcatgtttggaaagaataaggaatgaatctttactgagccatgaccttgagccagagactcttttaggccttatctatctcctttgatactaatactatcacgtttgagtattattgacctatgttccacataaagacacctcatctgggaacatttaaacacaaggttacaatgttaataggtgacagaaactacatttagctctggatatgtcttgttttaaagccagccttctttgtatacgaaagttttgctcaagatatttaaaagaaaattgtattttacaaaatgaagaatcccttgatgggattgcttaatatcagctagataaaatatttttaaaagtatactaccgaatattgttgcatcaaaactgtatttgcccaagggtggcatggagaaaacactctcctttatgtgattatccaaaaattttcatacaaagtaaacaaatgtttaaaatgatcattctcagcattctcccaaatatttttacatttgccatgcataccatgcacacatttaacgcacaccattacatcaaagatggtaaatgcccaatcttacttccctctcctctagaaaatcatctaggcatttagtcaacaagtaccttatacagtgtcaaggggagccattaaaaacatggtatacagaaattggatttcctttcctgagtattgcaacgaagaatggaagagaaaagccaggctgctagcatttctccttttgtaaggatatgtcagcctattcagagaacaaatgacccaagtcaatgagtgtgctgagagcttatccaggagagctgacactcaacttaagctaaacttataaactgtagtgcatgttcaatttattttatcttctgcatttcactctgtcactccacttgatgacattaagtatagccttgcaaaggaaatagtatctatttctgaaaggtttaggtgaaacatcattatatttccatttctgaaaggtttaggtgaaacatcattatatttccaaacaaaatgaaaacaagcaccttggtagaggaacggcataaaaacaaacaagcaggaggtctgttattttcaagggaattgacaacttaagaaattcacagttctacatttaaaatgtcttcctttttaggaaaattccatggcctcttctgaaacatctggaaaagactatagacatgttctttggatgcaagttatggatccatacaaaacgtattgatccttatataataaaacccacaatattcggggggaggtaaagaagataggaaggtaacggatgagagtttggctacagtcatgcaaatctgggttttaattctgactttgccagtctcaagtctctgtagaatcgggaaaagtattttcaaagcctctgctccttcatctgtaaaatgaagataataaatagtacctattgtatctgcacagttattaaagggcttaaatcatagaatatacccaaaatgaagttttgcataatgcattctcaaagacattgttcagtacattttgactagcattattatttatattatcacagcttggttcagtccctcatcacttctcacttgaagaactgcctccttcagtcagttcatactaaacatttggtcaaactcatgtgatcctgtcattgtcttaattattaacctcttacaaataccccctatttacacagaatgtttttcaaactccaggtcatgatccattaatgggtcatgaacccaatttaatgatgagtcgagaccaaacttaaaagaagaaagaataaaatggcatgactacatagggcatagaaagatagaatagactacatagggcatagaagaatagaatagaatagaatagaatggaatggaatggaatggaatggaatggaatggaatggaatggaatggaatggaatgggatgggatattgtcagagaatatgacacatagcaaaggtaaaacatatttttgaaatcatttattacaattagtatgtacatgtgtgtgtgctgtactataatgtaaaatatatgttcttacttactaggtaatattcaaagtcatctgacaagcattgggcaggatgatgtccaacattaatgctctgctactcatctagccactgaccctggtcactcaatattcaagacttaatgaatggaaagtggaagatgcattttgccttccttttgcttttgaggtgaggtaagtggtttagtatgatggaaagtggagtacaataggactttgattttatgagttggtaatttttttaacctaattttctgattcaataatagaaataaatatactttagactttaaatgctaataataccccatcattgcccttcctattctatcttcagaaaaagtgaatataatcattactgaaagtattatgcacaaaaaataggatcagaaatacaagtttaaaaatttctgtgacctgagatttttgtgtacatattagaatagtatttttccatttattgagttaaaatgtttctttatgcaaataccttttcaaacaaagacatttccaacacaaatccatgaatccaacttataaataaactatgaacactggacacaatgcatgcaaacaggacatctggaatgaaaatgcaccctcctgagataactaggaagtctccattttacatttagctagtcactcaagcatgaagtagtcttttgggaagaatgagaagaaagaggatcaaatatgttaaaactagtgtgtgcacccatcctagatcatagcatttttagtttcaaagattctcattgcctttctcacactagcaatgctcataaatcgggcctttaactaaaaatccacaactgccctaattctaagtggtaagagagaactcaaatgcaaaatcagactcatgtccatgcttataatgtttccatttcccctttgaagaaaaccgccctcagtaaaaccaaaagtgaattttagtgcatatccatcatcttaaaaaaatggattttacaaattaagcattatgaacaatttgtaagtgcattctaatactgtacacagagttgagagccaaggattttagcatctgataaatctaaagttaaatatctgagttcaaggccaactcaactattttctagctttgtggatttaggaagttatttaggcttgctgtgcttcaggatcctcatgggcaaaattaagattaaaatatctactttataaggtagaagtgatacttaaataaggcaatatatatatgaaacagttactccaggatctgacatacaataagtgctcaataaatggtagctattaaggttgagaatagtcataaagaagtcctaggaactagctaaatagtaaaataccaggattatatactctgcctttcacaaaataagtgctattagggaaaatgttttaacatcagcatttaaaactataatattttaatgcaattccaatataaatttatgtttaaagggtaaattttcatggttgaaataccgaacaaagcccattataaaaatgttttatttcacccatttcttctgagttccaagcagggaagataaagaaagaaaccaaatgagtagatgattttacatgataaactcgagaaaaatcaagatggtgcttcagtgacacacagaagtttcttacacatagtgatagtcaaaactagtttactgaattagaacatcatgtaaatatttcattataagattttttgtgtgtggtaaaatttctgttcttttcttgcatatgttatttatgaacataaaacatgcctcactcatcctcatgagtctccacaatgcctggcagatagcaggcactcaatgaacttaatttgaataataacataagatttatattacaagtaaacaaggatttactgctcagcaatctgcatagcccatggttagctacaaccaaacctttgaggtagcctgcctttacatgagcagttggaaaaatcattaccctcattttaattttccttctcccattaacgcttatacttcagtgagaataaagttaaatgagtgtctttttcttcctaggttgcttacatttttaaacataaatctcagacctaaaagttttgtttcccttttgaaaacaaaattaatttagaaaaatgtaatcaggttttaattttttaattcataaagggcaactaatttctcaacctaaattatagtacaaatttaccaaaattattttagtcataaagaatttgcataccataacagaatcattcttcgaaaacttaaagccaaatctaatacacacacattaagattttaggaaactgacaagccagaatataattaagtgaaaatttagagagtatagagagcaaattggccaaattaatttaaaataggaaattaattgagcacctacaattattactaatcctcaaaataaccaattagctggcattattccccctttagagagagcaaggctcagactcagagacatgtggctcaagaccatgcaaccagtgagggaaaattctaaattcaatcctatgtctgtcaaccttcaaagcttgatttctttccactacactttagtgctggaataaaaacttggaaggaacacactcacacaaagaaagattgatagtgatgagagggagaaaagtgcgaatttgaaggaagatgaagtaacttcttgaaaacgtttgagctttgtagaggagcaatatacgtaatcctctccaagcaagtgtaaccatttcttatgaatggctgagttttattttatttcatttttgtaggaaaaaactgaggtggagaaagcaagtggcccaaggcaaaaatagcagttgaacaaaaagcttaacatagtgaatacttacacttagcacaggatttgccaaatatagttgtttcataaacatttttggaacatataacagtaatcattaataagtatagaatgttcagtgaccccagtgctggggtaagcatttggcatgtaactgacatttctcatgacagtgctatgaggtgggtgttgttctcatctccatcctctgcatgaggatactgacattcagagagcttatgctgcatgcccacttcccaagtcggtagagacctggcctggtccaggaactctgcttcagatccccagatcctacttactatgcttcactgaatgaatagaataatcaggacattcttatctcaatccaattacttataaatcaaatttttgctgcaaagtttatcatcaagacttaaattacttttataaaataaaataaatactacttacacaactgaaattaagtgaaaacaaaggaaagaaattgccatatatttcactgtgtcatgagaatgagagtcattgatcttggcagatctgaagcatcctctctgctctttaaatgccaaactgatagattgtcaggacaagtgaaaaatatgcctgaaaactcatcaatacccatatattacaggaagcattgcccgcaaaaacaattatgcttgaatatgtgatagaagtcttagtgtataaaatccattatggcagaaattagaaatgagaggaaattccaagaagcttaatttattgattattattttcatgaagtgagggtgttggaaggaaaacaaaaccttgagataatggaacagagaagtataattaagaaatatgtatgatgtttatcagttttaaagactacaatggatcatgattataattaagttgaacaactaccaaagaatactcattgataaaattaatacttgcctaaaaagagagtctctatcctttggtgaagaagagaaactgatttttatgaacaataatgatactgtttaaggataatgcatatgtgtgacactatactaagcactcactcacactgtgtgatttaattttctcagcaattaattaagaaccagcaatgagttaagaactccattacataaatgttgggacaaaaaaggcaaaataaaaaacttgacctattctagtatcatcctgtagttttcatttatagcacatttccaattgttaattatacacttaattatatatttatttaagtgtgtattcatttttaaattatatgttccataagaagagggatcgtagatttaatttatctctacatatccagagtctggctcattgtaggtgctcagaatatatgtgttgaataaacttatgaataaaagagatgatgtcagagttccagcatctaaatgcaaagacattccatacacttgcctcccccagtgtctccctttgggtgaatgtggaggggatgggtgttaggcgtgtgggagcagcagtgagatcccagaacagttaaggggagatttttttaaaaatcaaaggaaggtgtgacaggaactgaattaaaaggttccaaaaagaaaagctccaagatttaagatcttccctttgatactaatcaatttattgaagactcttgacaaagaacaagagaaagagcaaacaaaactgataggacggagcctgatgcattagtcacttgtcaaaatttgttggtaactgaagagaaagtatgtttagcttccaagtccatttataaaaatatggttctcctgatactaaaataacccctggattcttccatagtaagggaaaggaaaaaatgtaatcatcacttatgtgtgtgctattctgaactcaggctattttttaattggaataaggtatcaagtctcagccttatcattttaaagtagtagttcccacaaggtatgattaggaccattatttataacaaaaagcaaaagctgtagtcttattctcgctagccaggagtgaaatggtgttcacttatcaacaaaactatctttgttctcaagaaggttgaagttattacccaccaaggactgctttgcatctactttgaggaattaagacatcaacaccaactagagatggcacaccattgttgtttgtgtatatgctatgtagatggttagattttacatcaagccctggatttattatctgagggcagatgtgtttaaaatcccgcactattgggtataagtaactttgtggatgccacacagccactctagctatccattttctcatgtcagagacagaatgataattcctgacctatctcctgaagctactggaaaaatcacaaatgaggtaagggatataaaaacaccacataaaccataaagtgcacttttcattttaacataacccatcactctttctttacatcactccatttaatttctgcattcaggtgtcaattttcaaaatagaaagacagtcttatcttcagttgtgttggcagatccagctgagtaaatgaagagttagagcttgggaaatgtgctcttccctgcaaacaacaacaacaacaacaacaaaaaccacaacagtaataatggctaacatgtattaagtgcttattctatcccagacgattttctaactcactgcagctgacctgcagtaggacaactccattctgatattgggtcaggtcatgggtgaactagcataggaatgaccaagagaaccattgtgtttgccatgttcatagtataagaaactggttcttcagccttcactagttggagaaagggtacagaaatattgtcagagtgggaggaaatcttagcaaacagttaatacacatcttgcccaaagagatgcatatgaatacatatagccctgttaaatgcttacataaccaatgtttatttgagcacctccatgtataaagaacttaatacttcatgaatcagttgcattccatttttgtatgtttaactaataaaatgttccctttctttggtattgtcttaaaatctagcttcctgttgcttccatctattgattttagttatcccctttgaagtcaaatagtaaaactaaaataattattccatgtgagagcccttaaatatttaaagacatatgtcatatcttggctaagagttatttcctcattaaaacaaaataactaccaacattatttttcttttaagatataaaataaaataaatctatgtagatagtggtcagattctgccaatgaaatcataatgatctacttttcatgtatttaactttgagaaaacctggctatgggtgctaggcaattaccaaatcaaaggttgttatggtgaggaaagtctgaataaatgtttaaatcccaataacttatccctgatcttccctcctcccctcaagatggcaaccttaaaccaaaggagaaaatgcaaagattttgatgctaattaggtatgtgaggtttacctcctccttctccgatggtttgtaaggccattccagatacatcaggattgtaaccctaagtgtcccacgccctacatcaggaaatgaattacctatatttcagatacatatgcaggatacttctactttctatatctttacttatagggagctgtgatcccaaaccctactaaaggcatcccagaccacagcagaggtactctaaaaaaattagctggtaatggaaggaacaataacaatacattataccctaactgtaattgaaatctactctgtctctagagaatattgtcagatacctagccaagaatgggattttattttctaattgtgtaaatgttcctattttttttgtatatcatagtatttgtaattagtaataagtcactacgacataaggattctgcaaccatcacttggattattcctcaatatttaaattcagagacacagcaggcctggtagaactaatcaccttttcatccattcagaagcagatgagtatctcctactctgagcctggtgccatggtgagcactgggaatagagataaaagaaagtcaaatcatatggaaatggaaataatgcaatagtgagagacgaaaagaagaaaccagattactataaaatagtctaagtaatcagttaggatatcctggactcagtgctgtaggggcacaaaaatggaggtgtgtatatatatatatatatatatatatatatatatatatatatatatgtgtacatatataagtacacatgtatctatacagatacatatatacatatatgtatctatacagatacatatatgtatagatacatatatatgtgtatagatacatatatacatgtacatatacacgtgtatatatatacatgtgtatgtatatatgtacatatatatatacatgttcagggtcggagaaaaggatagtaaggcaagggttctagagaaggtaatagctaagctgagccttaaagggcaaaaaaagcatatgaggcatagtctagaccacaatctaactggggaagcaagaaataaaatattaatgcaaaagggttgaattggataagcagactaaatactgtaagcaaggaaaataagaaacaagaagctacatttaagaagcagctgcttctctgtatttcgaactatgtatgaggtttaaatagtcaaaggacagaaggcaaattatgcttcctttaattctctcttatagtccccaattttattccttcatgacactcttcacaagtgagtaataacttattaaaaactgtccccccttctaagctgtaaattacagaggatagggaccaagtatgtttttttctccattgcattgctgccattaattgagtagttctcaccaccaagcacctgtttagttaatatttgttaaatagttgaagaattagattaatgaattgaatttcataagatgctagaaaagtaagatgttttataagatattcatggtttggtttagtgatgatgccatgtaaattaaaaataaaatttggaaggagcaactagaattaaggaagggcaaatcagagggtaggaaaagattactattagcatttccagcaaaatttagagcttgtattgtcttgatgttttagtataaaagtggtattatgaaaaaagtatattaaaggattaactgggttctgtgagccaaaaaaactagaggaggagtgaatagctaggtgaatagctaggcagctggtgtctcactcattctggttggaaagggatgaaacctattctaaagtgttttcagtaggtgtgggaagggaagaaaagaatagctatcaaggaatcaattgtttgtgaataggatggcatagaccttatttggcaagaaagaacagctacataatttgctgtgtctggggaaaaatagattgcagggccccttgtttaaagagtatgaataatctcaagactgtgacacaagaggctaaaataagggtggggtccttctaagtatgtggccctttgcaaccagacaggttgtatatccatgaagctggccggttgtcaggaatctcatataaagaaaggaggaaagaagaaagcaaagaaaggatgaatgaagggaggaagaaaaaataaaaggtttagggatgtttatttcagcatatactgaagttgtgtgacatagatatacatatattaaaaataacctttaattgtatggtgtatcatatctcctaagtttaatatgtgatcccaatgggtcattactatcttcaatgcacagtacatgttattagtttattgttttgtagagaagggaactagacaacatgtttggaccagtgtatcagtaaggctatgcttatagacaaaactgatcctctctctctcttaaaattaggtcttataattttaagctacataatagaaacaatgtccaagcaaggcaggtaagtatcccattaatctgctgaatatttctcagtgcagaaccactacgtctatgtattaatacttagaaatgggtaaaacacacaagaacactataccttgtcaagaggaggagactaattcaggtatttagatgtttgaaaaatgtcttatataaagaaaagctaaaaaaaattgacaatatttaacaaagaaaaaggaaggaaatatgggacaaatagtgcctgcatttattgaaggattactcagagaatctaaaatcatttgagctaccctaataggtgtcataaaaaacaaggaggaacgttataggaatgaacattttacttctgtattaggaaaaccttctgccagtatgaggtcaaaaaagaaaatggcctattcacaacaattttatttttacctgtgtaaagaaaaattgtgaaatattttgaaatagaccaaaagaaaacacaaaaacaaaacaaaacaaaacaaaagccactggctatcctgtgtgatgcagccttttgggtatctcaagcttttattgtctttgagatattttgtaactacgtaaattaaaaaaactgaaaataatgcaaatcacttttgtctattgcagtgcaaatttgtggtgtctaaattatgattgccctataactccttttggatgtacgtgtaaattctttttagcattctagatttgcctagaatgtgtggttctttgagagtcactttgaatcaattataatatcttactggtgacttcagtaattctggagttaaataaaatttttgagatgtgcatttgttctatatttgtatgagagtcttgattttacctttaaaaacctttatcttttaatacttgcaagtgtgcaattaaagcaagttattttaacatctatcagaaacattctgaaagagattcctgaatttgtagcagactgcactaaaatattctcaaaggcaccttttaactctgataatgtccaatatatgaagaaaaggaattaacagaaagaataaattgttctaattgaatgacttggcgaagggaggcaccattgaaagccacaaatacagttctacggtgctgcattggaagttgtctgtaagtgaattcagacttactgagaccaaagtgatagagggatagtcatgggaaaatatactggagtaacagaattcaggctgaattctggatgacaaaatcagggatctgacttagaagtcattgacagagagaagcattgaaattatcactatgacaattatgccaagaaaaaggaagggaaaaatcagcaaagagataacatctgtttttttgtgaaatcctcagaatgtggctattgttggagaagagaagagtatttattctttgacacaagtttccatcttggtaactatggatcatggatgtctcatttttttctctgtaacaatgcaagagaacaaacaacatatataagatatctcgtttggttattttaagtattccatcatagaaagtattgacttaccttttaatttctcattttattctcacaagttttcttagacaaaacagaaattatcattgattggttggagttttaaaagacctggataattttgttaaggttgatcatcactattatgcacaaataatttaaacaggtactttggcttcttgagaatggagctctcagtaattttgttcatagttgtttgtattccaagaactcctgaatccaaccccatgattgaattcaacatcattgtaaggcacgtgcttataagaaagctgcatatttaatcttctatttctttgaaagaggtgaaagtataattctagcaagacaaatatgcaggcctaattgataatttttatttctatatagagattcaacaagagctaaggtgtcatagaggaaagtcactgaaagagctgactagcacataaaatattttttttggtgtttgaagcgagaaaggaagaaacaacaatctatgattagagtgccccttagtttcatttcaaagagcatgaggctctcatggctgtatgaggcctccactaaaataagatgaatgggaaggaaaaacttatgagtttattgaaattgcaatattacaatttgccaagagttctgatctatgatgtccagtggttttccaactccttggactccttctaaaatgctgcattgcatatattcattctgcaatttaaataatgtgtgtgtgtgtgtttgtgtgtgtgtgtgtgtgtgtgtgtgtttcttaacagagtgaaaaaaaaaagtcctgctactccatagataccagggcaaggagcagagtgtttgtgtacacacattggactgtaaaaatcaagaataaaattcttaacttatgctgccacttctgggctgaatgcccattgctggttaaatttaccctaaaattgcaggaattaaaaatgtgatccgtttattatctctgaaagagcaaagacagagtgggaacctccgagtggttttgtggtcggagtgctctgctcttctgctgacagcctgtcagtgccctgttcctttctcatccttaattagaattctcggattctgaggttgccgtctgtaccacatttgccactgtggtccccggacctggcacaaacacggctcacctcgtcctcataaaatgactcattaccttctccagctgttatctattagcactgcagattttgcaccaatttccatgccaagtcatctctcccaccctccttattgccccacaacctactggagccagctggtgagaattcccacaccttgtttaagaggacattttcttgacacatcaagacagatgcatgcccttaagtgcacctataccaagacctgaaacaggataatttgtccagttctcagtcacagatattttgaaaaatctagttccatagcagcattaatgccatgtcaacatttgagacaaatagtgcaagaattgtctgttactgagtgagccattactcaggctgttctcatctgaagaatctttgcatttagtgtgttcaagctaaaacaggaatcatttgtgttcaaaattacttctgaacacctaccagccaacataatttgcttacttagtataccttggggcctgcatgtatgtaggaaatggagctaggaaatgagacttgtgaacaagctgaaagggaaaaaaaacaggttaccttgaaagatacaataccaaatttcttgtaatttaaaataactcctcaacagcaacaatgtaaagaaagacagttgctgtgttctgtgaaggaagctgtgctctcagatttatatgttccaactcatggcatcctgagttacaccatatgttaggatattattatagagtttagagatatagaaataaacaattcaatatttttgaaatgagctattggccaaaagtacaaaatcttttaatgaacaacaacaaaagcaaccaacgacaaataagggagaatagcataatagttatgaccaaaggttttgggctggaaaaatacatctgcttaatttcataacacttttgagcaattcttaacttttatgagaacaataataatatgcagggctggtgggtagatgatataagatgtaaaattctcagggcaatacttggctctatagtaagtctttggtaaatagaaaccagcattagaaattataatggggaggagggatgaaggtaggagggaagagagagtaaaacatagtcaataatcaatcaatcagaacagagcagaatggcttaatttgatctcaggaagaaaaatgctgctcagagataaagataatttaaaaattacatgcaacaaaaaattgatggaagcgtctacatgaaaatttaaaacttctgcacataagaacaaaccacatttcttaatccatgtgttaaatgtggcacaatggaagtatactgtctcagggtttccttcaatttggaatattaatatttagaatcaacatttggcacattccatttggaatattatgttggtgcaaaagtaactgtggttttggtcatgaaaagtaatggcaaaaaccacaattactttttttaaaaaaatttattatactttttatactttaagttctgggatacgtgtgcagaatgtgcaggtttgttacataggtatacatgtgccatggtgatttactgcacccatcaacctgtcatctaggttttaagtcccacatacattagctatttgtcctaatgctatccctacccttgcaccccaaccctctgacaggccccagtgtgtgatgttcccctccctgtgtccatgtgttctcactgttcaactcccactaatgagtgagaacatgagatgtttggttttctgttcctgtgatagtttgctgagaatgatggtttccagctccgtccatgtccctgcacaggacatgaactcattcttttttatggctaaatagtattccacggtatatatgtgccacattttctttatccagtctatcattgatgggcatttgggtgggttccaagtctttgctactatgaatagtgctacagtaaacatgagtatgcatgtgtctttatagtagaatgatttataatcctttgggtatacacccagtaatgggattgctgggtcaaatagtatttctggttccagatccttgaggaatgccacactgtcttccacaacgcttgaactaatttacactcctaccaacagtgtaagagcattcctatttctcctcttcttctccagcatccagtttcctgactttttaatgacagcccttctaattggcatgatacggtatctcactatagtttatgcaagcaataaacatatgaaaaaaaagctcatcatcactggtcattagagaattgcaattacttttgcacaaacctaaatagtaccatctagtccctgaaaaaatatttattgacaatctaccgtgtgctgacttctctgttcagcctcaatcctatcctaggtagtggaaaactgagaatccccaggagcatgtgagaaattaaacagagcagcttcaggggccacttgaaatctcctgctttccagagcaacttgtgttgaagcacagagaaagtgttgaggattgttacttcaataaatccccaaatttgcattagaagacacttagtttgtccttagcgcaaccaacgccttgtatcatggcccaactctcttaattgttcagctttcattctctgtttcttgtttaacacaatggtctgtatctcatagaattccaaacagacataggctacttttgtcttaaggcaaattggcttataattatactaattcaactaatatttatattttaccatctacaataaaaattttcaactgtttggatgaattctaatgggcaaatatttcagtacaccataattgggcttcaaaggcaatttttattaatgcttcttgtaacatacgaataaacacatttatatatatgttacaagaagtctattgactctgtaaatggtaaaatctgttaacactgcatttttatttctgctgttgcttttaggagttgatctccataacctggaataaagatattgtctttcttaacttggcatgttgctaaagtcatagtcaaatcaaattgtgtgtgcactgttttgaaacccccctccctatctccatctacctttcctggagaggaaaaaataaaaacaaaaaagaacaaaaacaaagcttgcctccacctggctttgagccagggaagaagaagaaagaagcttttgttattgatgctatttataaccctgaattactccgttagaataatggggcctgagcaggggaaggtcttttgtttgcttagtacaaatgcgtcttccccctcagtaaaaccttacttaggatcatactaaacagtcactgcaggtaccaggtgtggagctaaaagcgaggaaaggaccaagatatttgtaaagaagaaatggagaggaactgagttccaggcagaagatttggaagcggaaaccatcctccgaggagatggagagccagtggaggatgggttactttctatctgaagcctgtggagattgagaagaaaataagtgtttcaaggggttttgtcaagtgaaacatcatgggggtggtggtggtgaatgtgaagtcgtcccacctacaatacctttgataaaatattgttcattgatatggtttggctgtgtccccactcaaatctcatcttgaattgtagctcccataattctcacatgttgtgggagggacctggtgggagataattgcatcatgggggtcgtttcccccatactgtttttgtggtagtgaataagtctcagaagacctgatggttttataaggggaaaccactttcacttggttctcttttctctcttgtctgccgcgatgtaagacgtgcttttcaccttcggccatgatcatgaggcctccccagacacatgcaactataagtctattaaatctctttttctttataaattatccagtctcgggtatgtctttatcagcagtgtgaaaatggactaatacacccatgaatatcttcacacaatgttctagaaagaagtttcttcctgtttcaaaattagcataggatgaaagccaggcttgtctcagaaagctgaggggagggccacatcaccaaattctgccatcaaagccactttccttcagttcattggctttcccaaggtatgaaagaaaagtgttttctttgattggtccttttattatctacagctcccttggagcctaggtctactgtattcattcaaaaagagttggcagattggggatgacccaaaattacaggatttaggacattttcttaaaatatactaccatgctgtttttactgctttaacagcaaagcatccagacaatgcaggtttttaggatattgtgtttttccagagaaatcaaatgaattaggtccccagtggtaaatataaaaagaaaaagaggacttgttcgatttatagcaaaacatatatttagctataaaggagagaaagaaaaagacaacagaagagaaaagaaaaaatgcattttaagagagtaataaataattatgaactgttgattcagttgggagggtaaattatttcggtacgtctgaaaaattcagaaagctgtaaaatcactagtcagcatgccactgactattctggattaaagcagcaccggttaccattaaatgaaaggagagaacacggaagaatgtaatactgtgttttatgcataaacagtgttgcaagtacttactacatgcaacaattttgtaagattgattttatacccattttagcattggggataattgagtttcaaaaaggttaatcagctagaccagcttgtatagagaacatgcattttaagttaactgaagaatagttgaactcttagtctttgccaggctgtatacaagatcaaggtcagaaaactttgtaaagcatcagatagtacatattttaggctttgcaagtcatacagtctctgatgcaatactcaaccctgcagttgtagtacaaaactagctataggagatatgtaaaaaatgagagtggttgtgtgccaataaaactttatttacaaaaccaggcaggcagcagactggatttggcctggggtttatcaactcctatgattgatgatgagggtatgatggtgagaaagtcaactcattaatccctcacagagcctctctaattctaaagacactatttcaccgttttcttgcatctgctttatttagacagtgcttccccccaaaaagatctgagatttttaagctaaaaatgtttaactaagaaaagtaaatatttgcaagatctacacatgagcaccctggttcttttgcattcatgcaccagtggggtctcccaactcatccaatttacgaattttcagtttgtctccatgtctttccacagtttccaattccaagtgcaaatatcctcctagctgatttcccattaaacagagccacattatgactcctggaagacacatcaggttaggattattagacttatcttcagggaacagacatctcagaacatatcagaatttatgaagttgatgcatttgattaactgtatcatcgctgcagtcctacagctggattattgttttgctgtcaacattcgtcagatcttgatttgagcatccttgcaacactattcctcctctgttcagttagctcctgtgtggagacagggacccttcgggaaatgttctactgcctcctatgttctgctttgaatcctcctcccctgtttcacatgttaaaacaaataatacattttgaatattaatacacatttttgaaaattatttttcagtctgtacaaccttttgattctggttacttccctgtcttagaaagggaatcaataaccaagagtgtttttaaaataaagtttctattataataattatgatttactatttttatagtactataatttcagaatttccttaaagaaattaatttcgaagttcacaactttcccctcaaaatgcaaattgtaacaaaaataagaaagaaaaaaatgataactaccatgtattacgtacttaataggtgccacagactgtgttaagtaccataaatggattgacttttttacatgcaaacataaaattataaaattagaggtaagcttgagagcaaaataataccacagtaagtaattcaagtgacagtgctgtcctttgttgcttctactacaaagtgaattatagggtttggcttttactagttcagatctgtattttaggtgtgagttcaataattgttctgagcagagttgctctggccaagctgactgctgtattctgtgttaactttcctggtttacctaccaaaggtgaaatgctctggatgccagaagaattgagtttaagaagccaggatttggagataacctataaatattggaggcaggcccaaaggaagttgtagggagtactaaatataagacttgacgacaatagagacacagccctattctcagggattttgattcactagatctgggtaggattcagtaataaatatcattttcaacaaaaatcctcagcgattctgctgcaggtggtcctcagatcacatcttaagaagtattgatgtaaacagaactgtttcaaactgcttctttcttcattcccttactccctctgctaaccaagtcctcccactcagtccactgaaagggccaggcttggtgatgctaaggtatggcttcctccctaaaggagataaacaatacaaaaactttcatgctgagccaaaatgttcacttaatatcaacttgtaacagtctcttgtattttgtgtctagatccttgatccaaaactacctaaatttggaatgaagctgctcaaactttcataattactgacattattaagattttaaatctgtatagaactaaagttttacttttttaattgatgcataatagatgtacatattttgggggtacacgtgctagtttgacacattcatataatgtataaattggtgtaattgggctattcatcaccttatttactttttatttgagaaatattcaaattattctcttctagctattttgaaatgtacaatagattagcgtaaactatagtcatcctactgatcagttgaataccagttatcatttctcctatctaactgtgtatacttgtacccactaatcaacttctcttaaagttcttcttattttccagccatgcctagaatcttgacctagtactggtaaacactcatgctctgcatgtgtttacaacactttcgatttccccatggttgtgagctgttcctctgaattgacacttggatagatgtcctccaatacccatgttgtatttcatttccatcatgaatacttgtgtatgagctccttgctacatctataaaattggatttccagccttgccttatctatccttgctcaggtacctgctaatagacatctcctcttgcaaatcccacaaagacaccaaatccaatatcaccaacacaaacctgatccccttttgtcatttaaaaaaatcttactaaagaaggccatcactattccagtcactaacgttaaacaaacaaaacaaaaaactgggtgtcatcctagatccctttatgcttaccacacatcccttcatttaatcccccaaccgttttcacaggcaccagtgtcctagggttctatctgggcttcctagcaccaatctccctcctctcaattccttcttcacattgctgcagtccaaactatcatcaaaccaaatctgattatgccattgcttttcttttctccttaaaacactttaatgttttcacattgccaaaagaatcaatttcaacatccatgcaattaaaaagtgcatttataacccagagactgtcaatttaccccaactaatctccatctcattccatgtatataatcaaaattaatatatatccagctataataagtacttacagtgtcccaaatatgctgttctgcttctggcctcgaccactccaacttaaatcaccatcatgttttttctgcacctctgtaagagactctcctttcccctttctcttcccctaaacatgtcctccacccaaccccctaagtgaattttgataaaataataagatcatgtcagtcctctatttggctctccaatggcttcctgctgcactggatggatgttcatattccatccattggtctataaggtcctctatgatctgattcctgcctaccctctgccccttctctccttccatcctcccactctttcaaatcactccaacccaactgaccttcctgatcctcacatgagccaagctcatttctgctttaggaactttgctctcagaaccttcctgtagcttttcctccatgcttatgcatggctggttcttactccttattcaggtctcaactgtcacctcctcggagaagctctccttgaccacaccatcaaacgctaagtgtcctccccatatttctctgttactttactgtgctttattttcttcacgccatttctcacttagcaaaatcacctgaattagttagtttactaatatagtcatgcccctccccaacgcaattgtaaggacaccatttcaataagcatttgttgaatgtctcaatggctttgcttatgttgttccttctgcttcaaataggcttcttcaaccttgggcactgactacttgctaggctctagaatattcttcaacacttaattcaaacaactcttctgctgggaagtcctctttcaccccaaacagcattgatcacatctaggtttgccttgctccatgtctcattacagcatcaaactgtttcataactatttgcttgcatgtccttctcccaaattagacctccttggagtaaaggatgaatcttattcatctcaggatcctctgcatataacacggttctccaggggcagtagatactcaataaatgtatcctgaatgaacaaataaatctgctgctgcccataccagagtgtagataagatgtgagaacagtgatgatcagagtgatggagccttaagactaataaataagctgaactcaagtctctcattgtatgtgtgtgtgttgacttttcacatgtatagaaagatacacacacataaggtatgaataatcctcaagtacaatgattcaaagaaattacatataattaatccttattatattgctcagaatgtattttaaatatatttggtcatttatggctaatgcaacaattgtagctgcaactgtagctgtgggtactcatctttttgatttacgtatgcctgtaactgtacttacctaaattgataggttcagaataaagaaggaagagtatgaagcaattcaaatataatgcttagttcaagggaggtactttaaatctcttcttaattaaagaaataaagattcttggaaaccaatcattgaatttgaattttgccatttaaaattttatgaaacactaatgaataagatataatgtccatgtttatatacattcctataaatgttaagtatttgcttgcatctacatatctattcagctttgattattcctttttggcagttttatccaatatattgttttttggaaaaaacaacttttaacaatacttacaagactcatgattatttctctcttctgttgattttgccaaagagctttaaaacatcttttatcactccttcattacatggatgaataaacttatttgagcatttatttactaactttgcagttgctctagttttctaaattttgtgttttgaatcctcttctgtgtctgtaaaatgaccttggagtgaagttgtatctgcaagtcacataaagccataagagatcatagagatcactaaaatttattcagactttttgagtatttgcaagattgtgtgggaaagaaaaagaggaggaagaggagaaagaagaaagaaaggaaagaaaggatgaagggaaggaaatagagaaagaatgtaagacttcaaatgcaaagaagaaagtgcaaaatccagtcaaatgttttggctggttgagaaatgaaagcaggtaagatattacattttattaactaagaggccaactacttttgaatattttgaagcccacaatatctgcagctccaggtaccttgccggctaagctaaaatcacggggtccaacttctgttatttggaaaggcaattgcctgagtggccatgaatcttccaatcttaagacaattaaaagtaagtagcaatgataaaaaaaaaaatccagttaaatgaatgctaatgacctgtctgactagcgatgtgtctttcaatcccagatgaaaaatcacaaacaaaaagatttaacaaaatcaaaactataatatctgaaattatagaattggattctcatgtctaaggatttgcacatttaggcaatttatgtttctgagatgcttaaacaaatttaatctagtagactgatagtcttatagtttaaaatatattttaatcaaaatataatgaagtaactgatagacttgtgattttaagttgaaattttagtagacttctgttcggtaatgggaaatctaagatttttttcattcgtcgattataaattttaggttttacttttataaaaattatttagtgaataggaaagtttgattaagttagagagttacctcaaaatgaagtaaaatatattaatttttgaataatataccttctattactacatataatagtgctaatgaaatggtagtatctattgttgcaatgcagatgtggagtcatttgcttaaagcccattaaattgtttagaaacctaagagtaacagatgaatgcctactttttgctgtgtctaaatcatcctacgtgttagttgctcttgctatccatttatagataaagaaactctagaacaaggggtaaaggaatttaagtaatctgaccatgtttgctcagctagtaattttaggaaccagaatttttacctagggttgtgtgatttcagtataaaagacttattaaacattgtaatacagcaatatacagtaataccacctctatcttgtttaacacgatatattttgctcctcaaatggcaagcataaatgggaccttggcaaattgcaggattatttgctattggaaatttttgtctaagagtgaaaaataaccctcattaatcttttatttccatacagagtttcatagattgtctatatttaagataaagccaacttttacacggactacctctgaaaaatataaattggatgctatttgtctgaagaagttaggatgagatttgatatcctttttttggtacactaaatttagacaaattcaagcaattcttttgaaaatcactgtgggacaaagatattgaaagacaaactagaaaagtaaagtagctagtggaacatctttatcactttgatcaattatttcaaaagcctccaagaggtcagattacttcgctttaggtttccaaatgtattaggacattttcagtgtaaatggacagttagtctagtgaaagtgttgttcctctggcattttctgaactttaaaggacactggggtgtttctgggagtaaaacagcaagtcttctttggtgggattcttgcgggctggtcactaaaatgcaagtgtggtccacgttgaaatgagtaaaactattgacctatggctcagaagctaagagaccaaggatgacataaacatgaacactagctgttccaagggacaatgccatctggtttgctgtagacgctgtcagaaatagcagactcctgagattctcattttcactcttggcagattggaaaaggctaacaaacactatggcacaaaggtaaataaactttccttggaggctataggcttctcctcaaagtcaatgaggcaaggcaagtacatttttaaagtgagtccttattgaggatcattggatgcttcattcttgtgccttgctctgtcataaagcttctagggcgagaccaatatgcccaatctcaaacattctatttttaatattcctttttacaattttttttttgagacggagtctcactctgtcgcccaggctggagtgcagtggcgtgatctcggctcattgcaacctttgtctcccaggttcaagcgattctcctgcctcagcctccagagtagctggtactacaggtgcccgccaccacacccagctaatttttgtatttttagtagagatggggtttcaccatgttggccaggctggtctcgaattcctgacctcaggtgatcgcctacctcggcctcccaaagtgctgggattacaggcgtgatccactgtgcctggcgtacaatggttattttattgactaaaactaaattagttttcacatgtaaacaaagatagttaaccattccctgaccaccatcaaaaaaatggggtgggaggaggagttagtggctctgagtagacgcaagttgagggagtcttcttccagacagaaaaaaaccatcctctgttgtcttagaaatggtggccaataggtttccttccttctgttgttttctctttggacaggaaaaatatgtagaaagaatgagaaatgccctaagcattaaattcagtaccctgaacaatcttactggggagttgaacccatgcctggatagccagagaaagaattatattatttggaggggagcttggggtggtggccatccagatatgggaactcagagaaaggatatttctggcaatggcagcttcataatttctaaatagtgataatttgatcagagagtgaaggtggtggtggctggtaggataataacattgagactcgatatgtatggcaaacaggatcctttttaacatatcactgaggatggatggagaggaagagagttatctttctgagaatccctgatatgatctgggaacagtagtcagcagagtcattacttttctattgctgctgtaccgaattaccacaaacttagtggcttccaaaattgcgaatgtattaccttttagctctagaggtcagaagtctgatgtgggtctcagtggactgaaatcaaggtgtcagcagggctgtgttgctttcccagtgctctagggaggagttagtttctgtgctgttttgtttgtttgtttgtttgttgtttgttgtttgtttttgagacagagtcttgctctgttacccaggctggagtgcaatggcaccatttcggctcactgcaacctctgcctcccgggttcaatcgattctcctgcctcagcctcccgagtagctgggataacaggagcgcatcactacatccagctaatttttgtatttttagtagagatggggtttcacatgctggccaagctggtcacaaattcctgacgttagtttttactctgcctgcattctttggcttgtgcatgccttccatgttgaaagccatcaatggtgaattgagttctcaaatcgtattactccaatcttccctctgactcactcttccactccttaggacccttgtgatttcatgggttcctcacatataactcaggaaaatctgcctatcttaatgtcagctaattagcaacctttttttttttttataatgtagcaaaatatattagtagggtccatgaattaagatgtggccaccttggggtgctttcattctgtctgtcacaacagctgtgaaaaacatggtgtctggagccatattgtctagattcaatcccaatgccaccacatactaactatgcaactctggactaatgacacagtctctccacgcctcagtttcctcaactgtaaaccacagtgaataacgcctatctcagaaggttcttctaaggaataatgtgttaatatatgaaatgtgcttacaacagcacaagtactcaattaaaatgaacaattctgatgtccacctactttatcaagatagaagataaaattattaaacatatggcgaatgcctacaagcttcagacttaggagaatttgattgcagctatcaacaatagacacttacaagtgcttcctaacatgtctacactccaaattcccaaagtgaatgaatggctcaggagatcccagaatcaaatcaggtggacactattagaaagcacccgatttgatcccgggatctccccagccattcattcactctgggactccgggaatccttgcatggggagagcttctcacatataagcataatgtttatctgtagctctgccagttttcttagtcctgttcctttgaagtctagcattaagtaggcctaagatgtcatgcaagccactgtccatgatactgctggtctctccaacttgcatctgcctccctttctcacaggtcacagaaaaacctatgcttaccctgaatttttcagaacatagtcacatagcacagctggtggactctctagtaacaaagctatttccattgttccacaatcatctgcttcacaagagacaacaggctcctgagaactggggagctgagacgctgcaggtgacagttgtatacagacgtgcaaagttcttgggatctcttccaggttctaattcaggcccggatgctaaggcttgccctgctctgcaaggcttttactcatggtgcttttctcttaaaggctttattgttttgttttttcatgatggtccttattacagacatttccctctctactctacattccctttctattccctctgtattcttccacaactaattaccacaaccttagaagcttaaagaaacacaaatttattgtctgacattttctataggtcagaagtccagtggtcactgccacgtctttatttagaatctcacaagcctgatataaaggtgtctgcggggctgccttactttctgaaacctctagaggaatgtctctgttcttgctcattcaggctgctggctgagcttagttccttgtgctgtgcaactgagatccacatttccttgatgtcagctaaggaccattcttagattctagaaattacctgcattccttggcttgtgtctccttcctccattttcaaaggcatcaatggtggccgagtccttcttacatcaaacttctctgactcttctgtgttcctcttctgtttttgagaatccatgtgattacattggggcctccaggataatctccccatatcgaggtccatagcctttatcacatctgccaggtctttttttgccatgtaatataacataaaatagtcacagaatctagagattaaggtgtaagcatcattgtagaacattagtcagtcaagcactgcctcttgtactccagtcatcagggtcattagatctacatatgtctgaaatttttgcttctaattttctcccacagactccgagttctcaaagaaaatcaaggcatatggctgggcatctcttttagcatccttgaacagtctgtaatggcccaaatgtacttcaagaatgcagcaattgaaaacaagtcacccggagcacacagactagaggtaggtggtgcttcctcacagccaaaatgttgcctcatcactgaccagccaaaggtgatccatttcatccatattaagagatactgaaaatactaggagaactgatgagagataaactgactttcctgggagaatttagtaaaagtcctccaagagattatgttcaatttgaaatttgaagtatgcaggaagtttaataggaagaacaggaatggataggagaaatcatttcaagtaaatagaaaagcaagaatatgcttgtgaataatgagaaaaataaattttgaataaaattatgggtgtgtgtttgtgtatctattgtatgtatgtgtgtttgaataaggcatactgatattatgtattggtcaaccacaatataggaaaataaattgaagggcatctctttaaatcttacaggtagtccatgctttccacagtaccagcattatgttaaatgaattcattcatagtgatcaattcctcacttcgcatgagttacagttaatatggttctgtgcaaaacaaggacagcctgtatgtctatttttaatcaaagatctgaattgctgactacagggcatactcattaattcagacacctctgaagatagaaaaatttgctaggactagatttgaaggggatctttaaaaattagagcaacaagtaatcacaatgaagatgatatttcttaacaagatatcctcatggaaaatagagaaaagagaagaagattgcttccttaaattagggacacagactagtgaggtaaaagaaaagcagaaaaataatctgtgagttatacttgactacaaactgataggagagcaagaacatgtagcgagcaccctactatgtgctaagactgtgttaatctaagtacttttgtggttatcacatttaatactcacaaatgtttgtaagatatattttattaggtgaatgtcttgatgctgctgaagatcgaatactatctgaattgaaatattatctcattactactattcctcatgccacaccaggaatattcttgtcatacctactctgatattctggaaacaggcagaaactgttatatttaggagatacttctcctgctaccttagggatacttctcctgctgtctttagattataaaaccattttgactatgaactacttttcagtggcaggttataacaggtcatgcccttcgggcaatttataagcttgctatggctactgtaacaaaacactacagagtgaatggataaaccagcagaaatttattttcacacagttctggaggctagacatccaaaatcaagatgtcagtggggtaggttacttctgcagactatgaggaatgatctattctagacctttctccttggcttgaagatggctaatcttcaccctttgtcttcacattgtcttccttctttacatgtctgtatccaaatttcatctccttatgaggacagcagtgatattggcttagggtccacactaatgacctcattttaatttaactctgtaagtcccattaaacaaatatagtttcatttgaggtactggaacgtattataatctttctttttgtgagggaggatgacacaatttagcccataacacagaagaaaaacacaatcaaaattcacattagggattttagctctaagaaattaaatatgtatattagaatacataaaaacaccaataagaatacgaagtcatttgtgtaaatgagtttattcatacattttcatactgctacaaagaaaaacccgagactgggtaatttataaaagaaagaggtttaattgactcacttttctgcatgggtggggaggcctcaggaaacttacaaacatggtgaaaagggaagaggcacatctttttttttttaattatactttaagctctggagtacatgtgcagaacgtgcaggtttgctacataggtatatatgtgccacggtgatttgctgcacccatcaactcatcatctacattagatatttctcctaatgctatccctcccctagacccccaccccctgacaggccccagtgtgtgatgttctcctccctgtgtccatgtgttctcattgttcacctcccacttatgagtgagaacatgtggtgtttggttttctgttcttttgttagtttgctgagaatgatagtttccagcttcttccatgtccctacaaaggacatgaactcatccttttttatggctgcatagtattccatggtgtatatgtgtcacattttctttatccagtctaccattgatgggcatttgggttggttccaagactttgctattgtgaacagtgctgcaataaacattatgtgtgcatgtgtctttatattagatgacagcaggtgagagagagaagaagaggagtgaagggagaagagccccttataaaaccatcagatcttatgagaactcactcaccatctcaagaacagcatgggggaagccacctccatgatccaatcacctcccatcaagtctctccctagatacatggggattatggagattacaattcagtatgagatttgggtggggacacagccaaatcatatcagtgagcaattaaggaattaacagtgtcgaatcttggtttgttaacattgatgaagacaaatatatagccaccaatatccactctatctcttcacctggtttaaggtttttttgtttgtttgtttgtttgtttttgtttttgtttttttcctttcatcatggcaagaggtgctttaactcttcattctgtaatcccatgaacagctatacagatgtaccatacattttttggaggggtgggggataacattcttcaatgtcactaggtttttgtaggaccaactcaagccggcaggtatagttagagagacggaaaggtacaagaccaactatggaagaatccaatgcctccaagcattacatgttaggataaagatcaggatcactgtttgcattctcagtaagataaacttagagaaactgcatgttttcccttttctcaatgatttaactttttcttagttacgagacaaactttagaacagccaataatccattagagtgaagacataattgtctttttaataacaatgcctcaaagtgtgggatatacgcctgtcaactcagagttagaattgaatgtttgactttcattttatttatgttgtagaaaaaaagattgattttttttaaaaaaaggaggtttttctgttttatttcattttaggctgaaattggttgtcagaatacagcatcactgaaatattatgtgcattgaacaaatggagctgggttgcattccacagtatgccaccaaagtgaaaagaaacaaagtttttgtatagaaaactggcatgttaataacgtcacactcagtggcacatgcctgtagtccaatatactcaggaggctgaggcttggaaatcacttgagcccagaagtttgaaactagtctgggtaacatagcaagaatccatctcaaaagaaattgcactgactggggctgaaccctcaagtcattgaatcatggaattttaaaggagaagtctggctttttcagttgtctggagtggatacttaatttaattaaagagatggaatgcatttgatgaaaacaattaagccacattggcatactctacattggcatctaatatgatacggctatttaataaaaagctagtattctgtttgacagatcaattattcattaaatagatggggcagaaatggacacgcaaaatcaaagctgattaattcagcaaaatcttcaataatactgtcacctttaatccaagccaatggcttccagcacagcaggcagcttgatagagggtaaagtaatcacaatgcaatgtgttaagtgcaagttataagaagcactatgtaaagagtactatgcaaaaacagaggagttgcaccctgacttggggatatcagaaaaatcttccttttaatagaagtaatatcattcttagttttaatagatgtcaggcaaagaatgcataagtaggccgttcaaaggtatgtagagagaaaaaggccctgttcatattctgagaccctggtttcatcagtctaatcttgagtactgttggatcagcagccactccaccaagttggaacatgagggagtaattgatatttctcccataatccagtgtattcattatggtatactgttgcaatcatgctcccaacatgagccagcctcctacacccatgcccttggacagcctactaccacattcaatagggctgatatgtgttaaccaataggacattgtagaaatggcaccatgtgtcatcagaggctgggttatcaaagaaattttagcttctgccttgtttgttctcttggttcagtctctgtgggccaccatgcatgaggacattcaagcagccttatggagcagtttacatggagaaaaactaaggcctcctgccaacagccagcaccaactggccatataaatgaactaccttgatcatgaatgcagactctctaaagcctttacatggatgcaacctcatgagagacccctgtccagaagaacacaattaagctcctgaattcctgacccacagaagagctgtgagatactaaatgcctattgttgttttaagccactaaattttgaggtaatttattatgtggtaatagataactaagacatgagtatacactaaccctaaaataatctcaaaatcccttcatgttgtccaggtagtaccattaaatgtgacctgcatgttctcataagtgtatgtggtaagaaatgttccatgcatttatttacatgtgtctctagaaaaatattctacagggaaacaattcttctattcctcaatggatccaggtagggcccaccaacactttcatttattctggtggccaggcaagtgcaatggtccatgcctgtaagcccagcactttgggaggttgaactgggcagatcacctgaggtcaggggttcaagcagcctggccaaatggtgaaaatctgtctctactaaaaatacaaaaaaaaaaaaaattagccaggcgtggtagcatgcacctgtaatccagctatgcgggagactgaggcaaaagcttaaactcaagagatggaggttgcagtgagccgagatggtggggctgcactccagcctgggtgagaaagcgagactctatctcaaaaaaaaaaaaaaaattcttctggtcagagaaaatcaattcagcctttagctgagtagaatgagtacaaactgaaaagattattagagagtgaattttattcatgcagacaacacgctcttgacatgagggatgcaggtgtttaggcatatgctatacaaacttccagggcataaaaccaggccagaaagaattttctggtcaaacaagctcaacagcttaatagcagttccaaagctaggaaaaatgaatgcacccctaccttcactagactatttccctcctcccagctggaaagataaagggaaaataaacccttaaatattgagctatatatatataagtatttatatatataatatatatagcttaaattaagctataatatagcttctatttaatgcatattaaatcaaatatacattatatataaaataaaattacattacattaaaattatattaaattaaaattaaatatacattatagcttaaatatacacatttaagctatatatataatttaagcttatatagataaattcatatatttatggcttatatatgtataatctaaatctaaatatatatcatctaaatctcttacagacacgcattttaaaacccatcaaaaaagctgacaagtcaggaatccgttttaggacacctatgggcatattctgggaaaggagtcttaatcattgagaagcaaactctggagccatttcatggagggatcttaaaggcacacaaccattggttttactgcacatgtgtcaccgtctgaagccatcctgcaactctcacgagtcatctgctctgaagtagagcacacctatttctggaaaaagaggatcagactgtctttttctgagtgtggttggcatctatgggataggctttcctggttaaaaactagttagttaaaaactaggaagataagagtagcacaattgaaagaaagaatgaaagaaggagggagagaaaagagtgaaagtagaaaaatcaggaaaatctttcagtgatagaataaaaataaatcaaaggaaaaaagaaaaaaataatgattagagtaaaagaaactagaaataactttaaaaacatacatcatatagggccgggcgcggtggctcacgcctgtaatcctagcactttgggaggctgaggcgggcggatcacgaggtcagaagatcgagaccatcctggctaacacggtgaaaccccgtctctactaaaaatacaaaaaaaaaaaaattagctggaatggtggtgggcgcctgtaggcccagctactcaggaggctgaggcaggagaatggcgtttacctgggaggtagagcttgcagtgagccgagatcacgccactgcactccagcctgggctacagggcgagactccgcctcaaaaaaacaaaaaacaaaacaaaaaaaaacatataaaagtaacaaatattctagataccaaacaatgaaacagacaaaacctgaaaacaaagaattgaggagaaaaataaagtacatctctaaaatggaagctattcctgccccatccctaaatctgcttccatattttagatgactgcagttttattctttgagaaggcaaaagtctaggaatcattctttactcctcttgttctctcacaccccacatccaattttccaggaaatcttgttgattctatcttgaggctctttctataatgcaaccattctgcaatctctccaaggccaccactttgctctgagcaatccttgtctcttgcctgaattgtgaaaataccctatgaatttgtcctctggtttctatccatgccctttatggtctattctgaacacagaaacaaatgtgattcttttaaaggtaggtcagaccatgtcatgcctctgctttagcctccaatagctccctatttctttgagcaaaaaaacatacaaggccctacaagctctggctccccagtcactgcccttgtctcagctccttctgcccttcctcttgcatcttcatcatgctccagccttaaagctttgcacttagggtctcccattccctgaagtgttcttcctctaatgtttttccaagactgataccattatcttcttcaaattttgactcaaatcttacctttatctctccacctgtctcacaattgcacccttcaatccttcccctcccacccacctcttctgtgcatgactgatactctttattaccatctaacacatctccagactgctcttccctcttgagaatgtcagcaccaccggtgcagaagtctttgtctgaattgtttaccaatgtgttgcaattgtctacaacaggtcctgaacacatccctgtgtctctattagtgtcctggggctgtcgtaacaaattaccacaaacagagatttactttctcttcatgttagaggttatatgtctaaaatcaaggtgtcagcaggaccaaactttctctgaaatctgtggggagactccttccttgactctttctagtctctgtggtttgctggcaatccgagatttttctcggcttgtagttgtgtcattcacatctctgggcctccatagtcacatagtgttcctcttgtgtgtctctgcgtttcttcttctcttcttgtaaggacacgagtcatactgaattaacagcccatcctacttcagtatggcctcatcttaatacgtgttacatctaattaatgaattagctaattgatgaccttatttataaataagattacatcttgaagtgctgtcaggacttcaacatatctttttagagaacaaaattcaccccataacagttccccaaaatatttatttaaatgaatcaatgaaggtactaagtgatgtaagttcttaaaaacattctttggccaagggcgatgtgggaagtcccttactatagttagtacatctgagtgaatacacaaattagtaagacaaatgtagctgccttgataatgagtttataagtatttttaccaaaactgtcatttgataacaaattaaaaggttgtgtactgtgccttctttcaccatggttttacattacaaaatagagtaatttctaaaatgtaaatatcaataaatcataagaaagtaaaattcattattaaataaagttttacaaaacatactgtcatcctgtagtccctctgctatgagaatcacagagaagtgggtcattgtttcagaaaagaatatggcaataaaagtgaatttaaatattatgtcaaagaggaaaaacacctctttgtgtttttaatatgtcaatcattgctgcattttttattagaggacacgttttcctttaatttccctaatgtgttatagctttattcctaaaccacatgctaccatgattcctttgtgtaattttaagtaataaatcataaatgaatcataaacaaattatagaataattattctgctccagtgctcacaatgattttcctgctttttactttaatgtctcctattcctccttaatccaatatttatatttatgacaagcaccagttttcaatcaagagaaaagcttctgtgaagttgggattagagaatgttttattccaccctctattgtctaaataaacatgttcagaaattaatctcctcctttttatggatctgggctgtttcaaacacccccaggcaagaagaggagatctcgcttctacttctgatcatttgttttaaactctgtctttgaaattagcaaaatcctacagggactcaaaaaggttacttgttctttcaggcctctgtgagtttgaattacctgacaggtattgagaaaattatttataaaacaaaaacttttacagaagctaaaatataagtgacagaaaggactttagaagggacatgttgtccagaattatctaaattgtaataggttgtataccactgatggtacatatgatgctgaaggtagtaacatactattcaaaaacagactttaataggaatatatttgttttacattggcatcagttcagtttgctgtggtactctaaatactcagaggtaatttttgatgctcctagtctgggtaggtaatttaatcaaattcagtataatgctagcaaaaagaaagaaacagctcttcaagcctgtgatttcatagatactactgtccggaacaatactccctttaaaaaataagtcaattgagttaaagcccatttaaataaatcaagtatataaaattgataataaggtatgtcaaaaaatatgaaggtggtagccaaaataatgaaaatttaggaaccattgatgtagcagataagcaaaatagacaaagtaatcaagtgacttttcagattgagagctacctttctagttggagagtggatcattctttcctcttggtttttgcattctctctttctccttctctctttttctggtctctctctctctctctctcactctctgtttgtatttatatattttcttttctttttctttttctttttcttttttttttttttttttttgagagagagtctcgctcagtcgcccgggctggagtgcagtggcgtgatcttggctcactgcaagctccgcctcccgggtgcacgccattctcctgcctcagcctccctagtagcttggactacaggtgcccgccaccacgccctgctaatttttttgtatttttagtagagacgggatttcaccctcttagccaggatggtctcgatcacctgacctcgtgatccgcccaccacagcctcccaaagttctgggataagagacatgagccaccgtgcccggccatatttatatattttctatattatctcatatgttcacttgtttgtttcgtctaccaaatagtgagttacttgatgatcccaggacctcatttcatttatctatgtgtaaataccaacaataccaactatacactgctcacccgataagtgagactcaatacatgtttgtggagtgattggataattaacagcaaagatagaagttagtccattggcctccgacttccctccttaagtcctcgttcagaactattttcactgtaccatgcgttcaacatttaatgcttagatattcatttccaaagtcacaaattaaaatagaaaactaatgcgctccacattttaaaaatcttgagaaattgctaatgattatcaactgaaatatttgaatgtagaaatagctttttaaaaaattagtgcttgattaagcaaatattaaacatggtggtaccactgagttaaagcaagagtaagaaagatgaatatttattatttacataagttttgatcatatccttgttgttagctgtactgcatactttagaagacatgcaatcagacagtccaaattctaattgcagctttgctcattatttctgtctggatttgttcaaatccttagaacctttggagactggaggaaaagtaacaaccccaggtaacctgttcctgaaataagccaaataaggcatagatcccaaggtgaggctccctttgttgattgtattcaccaaatatataaatttactaataactttttcattcatcatctattcagtaactaagcacctgctatgaaccaggactttagctggtatgacggatactaaaatgggtaagtcctagccactgtcttcaagtgtttcatggtctaatggaagatgcagaaggcaaaaactcagatattaaaaatcataagtgctttagtagatcacaattgcagccagaagatgacacttcaaattagaaggggtgttaccttgggattatgatttcacttctgtaagattccatcttgtctcctgtaaaatgggtatagcaatagttacttcatgaaataaagtgatgtaaagaccattgtactcaatgttttgtggaagaagtaagggtaggtaatatacaccagaaattttaggcccaaggggcagcatgactgagcacattaataattaattctggaaatccatgaatggagtcagcagtaggaattggaaagtgattgttttaaaaaagtgttaaggagagtgaagatcaaaagagtagaaaccataagtaaagaaagaattgtggccaggcgtggtggctcatgcctgtaatcccaatactttgaaaggccaaggtgggcagatcacttgagtccagagtgtgagaccagcctgggcaatgtggcaaaaccctgtctctacaaaaaatacaaaaattagctgggcatgatggcacatgtctgtagtcccagctactcaggaggctgagatggaaggatctcttgagactgggaggcagaggttgcagtgagccaagatcactcctgtctgggtaatagagcaagatgcctgcctcaaaataaaaatacgataaaataaaataagtaaaaaaatacagtaggcatagaaaaatattattagagttttaccctcctatctaaaactgtccccaaatcctgttaactgaatagaaagaaaaatagaaaatgaaaaagaaaaaatagcattgatgaaaaatagttgcaaagatttccctgaacaatcagccctagctaagtttccaactaagcccaaactgtcttattacacattctacaactcaggaggggatataagagaatcccctacttttcttgctctagtttttacagctgttgcccatgtacttagccaaggtcatgtgctcaatcatccagtcccgagttttgcttctgatgccctgtctttcagtacagccttctgacctctatctccagtctgctccaaacctccatgatgcttccccagctctgggcctggttgctgattgttgttttcctgagattctgactccagtggtttaactaacaaccttcctactttttcttcttatagagatatctcaggctccgtacagaaactcttattaaaactcacagcattaaaccagaacacagacaaatgcctacaatggatgtgaagtgagccaagcaaaaagcaataaatagggagttttgaggattgttgcaaatagtagtaatgctccaaccaaaactactcaaatttaatttaaaaaggcaaaacatcactctagtcaaatagtatatgttcacaggtcaagaggattcagtctgccacacctaaataaacacttaatgctatctagatctctccagttgaaactgcagctgcctcagaccctgaagtgtgctgttcacaggaaaatgtgtcataattttgccatcttattacttattttttcctgagatagggtcttgctctatcacccaggctggagtgacgtggtgtgaacatgcctcactgcaacctcaacctcctaggctcaagcgatggatcgtcctgcctcagcctcctaagtagttgtgaccacaggtatgcataaccacatctgatgaaatttttgtagagacagggtatcaccatgttgcccaggctgttcttgaactcctgggctcaagtaatcctcccaccttagcctcccaaagtgctggaattagaggcacgagccaccatgttcggccacttcttttttttaatagacaaaaaggcaaaaggaggttttcacaatagacaatgaggcttaagcttgttttctgagaatccaacacatttgggcacgaaggtctgaagctggtctgctagaggtacattatataaaagaaattgatatttgattcacctattgttaatactcaggaacattctgaggttggagccagtgcctttatctattgaacaatcagaaagaaaagaatgacctaagccggcataagctccctataagaacagtgaaagacacatatctaagaagaacctaaagggatcctcaccctacttcagggctgccattggcaactggcacctcaaatactgggaggccaggcaactttgcctttcaactgtgagtgctggagagctccttgctgtcactgtcttcatgctgcgaagttattgtatcctttgctcatattaaagatgtatctttagcctggaatcattggtacctttctgtcaatcactgtcaccaggtagcaactaccaggtaattattcacagatgtacaaatgatgtataattaaaaactgcttgctaaagtcttttaatgactttacccccaagatgttccttatttgatctctgggacaagaaaaaacgggcccttctgagtatgttaattgaggtcataattggctgatatgtataatcagtttttccatgtgttttctcaaccttttgcctgcctatcctgcaattccacaccaattaaaaaagaaatttattaaatatatgtgttcttctttcattgcaaaatctcttattccccagagtatttcagaaagggcaagacaaccttgctttccagctgtttgcaagcattatgcctttgagtcattatgcagagctttttacaaaatcaagacatgtattcataatatctgttaatttaacatgtttatttatatcactggagcatgacttctgcatataaagaaagacatattttaatagttaaaatttaattaaaactataaaactacataattctccatatttataatttttaaataatcagcaaaatcctgaataagaggcatcaacttaaaaaaatagtttgaaaatgatttctctcaaggaaggaggaaggagtgacctgaattttacaaatagaaactttctaagtaacacctgaattgtcagggcaggttatacttcacaaaatcaaatcaatttctgtgacttgttttttatatttcttctgccatcactcagaacttaataactgggaagatttcaaatacaataggtgaaaatatccagtcatttatattttttgtataagtatttaacattcaatatgatggagcttatgacatcacttaaatgagattaaagatgtctgagcttagccaactacaatactagcagcaaatgtccttgtgttcagtgcagtactatgatttccaattagttttttccatcggcttaatttgaaatcataatatcataaacattctgaatttgacattgtgtgtcttcattttaatagcaggaaaacagatttgtaatttttgagcactttatagatggtgaattatatcacacactgagtcaaatcttattactaaacaattatgaatttaccagctagtgactggtatcatgctacttgctagaaaaattactaaacataagatatgctttatatgaaaggagattacacctatgaggacaggaaaatgccgtattcatcttggcattcatgtttttatcctacaaagctgagctcaatattttaccaacagtaagaactcaacaaatattgaatggaatggtttctctaataaaatttctctctctctgtctctcattcacagttttttagcttatgttggttcccaaactttagcttttagttttgcataagcattacctgggagttctgccacttactactttctgccatctactactctcaaagttcttttcaattagttatagagaagcttaggaagctacagttttcagaccaccagaaataccagcttagtagttaccaatagttctttcttgttggagcatctcagaaaagcattacctgggagttctggcacttactactttctgccacctactactctcaaagttcttttcaattagttacagagaagcttaggaagctacagttttcagaccaccagaaataccagcttagtagttaccagtagttctttcttgttggagcagctaagaacaagtcaaagtatttattgagaaagagtggaatttgaataataaccttcctttctgctccatcccagtgaaagcagggtgggtgatggtgatatatatactgtatacatgcacaagaatctgtgcagaaataacatgtatccagcatccctcactccaggcagcaattagccctttcttcccttccctccccaagaggcaatgtactacaatgaatagcgcacaggacttcagatcagacagaccgaagaaacttcaaattctgcctccattacttaccaacagtgaatttgggcaagtgacttgaactcccaagtcagctttataatatatatataagaagagtaataactagctcatagggcttttgtgggaatagagaagttcatagagaattttcatagcatatattccagaattgtaactattgttttttccatttacagactctaagttaaagaaagaaactacagtattaccagtcacatatatttatacactaagtgaaaatgtcaccacaactcaaaaaaataagtgggtgtggaatagatgaccttcgaccttgattcttaacctaggatgggataattatatgattcatattgatgtatttatccatatataatttgacataggattgtctaaatgttgtcagttcaaagtagatcatctggcctgactaaaaagttatcatatttcatattttagtagatataaaatttgactctaaaatgtcagtgccaaaatcttagaaataatattcatgtttttactggagtctcagataataataaatagctctgtcaaataaaaaaggtaaaatataaaatctgaaaatgggcaatatgtttcaacaagtgaagagaaacaataaagtcaaagactctttgacgccgtaaattgaatgccaactttctatttcacttagcttctcccccacttattatgctcttacaggttttgaaagactcttaacaggtaaatgccctcataaattcttgaatatactgagattagagttccccttctgctagctccaaagttacctaattttgtgacaaagtagctgacagaatgtggcaattaagctatgttcatattagacatggctgcatctattttttttaaccaaaatgatctgaggttccaaattatgaagcacagcaaaccaacagtgcttttcagggacaaactgaatatttaaataatttttaaataaatgatcatgactttgttggtcctcctttgctgagcactaaaatgatgatgatgatgatgataaaataataatatacattaaacaatccctgcagtactacttaactattttttacctctatttttgaatctataaaatacagataacaattgtatttacctccatagggtatgctgaatgttaaatatgttaataaatctgctgatctcagcacatggtaggttatatgagaatgtctataattactatttatattactatttataattatcccatttgtaaaattgagggcagtgggtatgttgttatcctaattggggagtagaggaagctgaagcttggtaaggtctgtaattctctcaagtccacatgggggacatcagtggaagtcgaatttaaatcccacttctctcattacaaatactctttccctaactcagagccttctcacagaaaactgcagaaagctggtgagctaccccatgtgcagaatgctctatcagtgactttgtcagagtagcagggcctgaacaaaagccaggtctgcccttcttttaagtcactctatataagagagaagtacttttgacatgcctttcagttaagtgtacttaaagcaaagctctcaagctttccaatgactaaatgctagaggaaataatgggaatagtcaatacctgtaactgaaaaattgctgactgtgtgacacagcaaatcattacactgttcaaataccaatttataaagctggagtgatcatagctgtctgggccaattcatcttagtctctcttggtttggaatgaatatttggttggtttagacagcaaaagcctttgacccacaaatgagaggctaggcttgccagatctagtaaacaaaactacaagcttcctagttgaattttaatttcagataaacagccaatacttctttagtatgttacaaatgttgcatgaggcatatttatactaaaatattgcttgctatttatctgatattcaatgaaacggagtgtcctgaattttacttggcaatcctagcaggggcttactttgaaaagttcctacctaagactgagcagttaagggaggaagttgttatagaatgaatgtttgtgttcctcctaaagtcatagtttgaagccctaatcctcaatgtgatggtacgtggagatgaagactttgggaggtaattagggttagatgaggccacgaatggtcaggttctcatgatgggattagtgcccttaaaaaacagataccagagagcttgttttttttgtttttttttcaccccctaagtgtgcacaaagaggtcatgtgagcacacagcaagatggcagccacctagaaggcaagagaagaagcttcagaatgaaacctaccttgctggcacattgatcttggacttcccagactctagaaccaaaaataaatttctgttgtttaagctactcaggccatggtgttttgttatggcagcccaagcagactaagatagtaatactaagcactttggggcagtggcaactaccccatctcactcaaacccttcatcaatggtggtaccaagctgtgtagacaacccttctttgcctaaatttcttgagtccccaagatgtccaatccctaaaggaactagtatgtaaataatgggagtcatatgggttcttttttcccattgaacgacagatcgtttctccacatgattggctgcacctttcctattttgctgtgcatttctaaaactgagttccattttttttttccccaggctacactctttcaggttccagtcactgttgtgcaactgtctggcttacaatctatgtttattttaaaatcccactaagaatggatttagatatataaagtcccggcctagtcacttttagtcctttttcctattgcctcttaaatgttgttttataactgaatgctgaagtcagattttcttttttacttcagaaaacttttgctattgaactgttgaaaatcttagcctaaataacaaattcttttgcaaaatttgtgtgtagattccaaaatctccaccttgttgaataaacttttccaattactttggcacacacatatgaatctagaccttttcagatttctacactgcattctacactaggcagtttagctcttggttataaaccatggtttagtttcattataaactatggtttggttgagctcttggttataaattatgttttaattttccttctattcctactccattttttcccgatctgtctttcccatgcacacacccatgcatgctcacacacccaaaaaactgttaatcctcatttatttttcattcatctttaaacataatcagtgcagtgctaaatacataactgctgcttaacacattagctgttgattattttctgatatttgcctgaattacactcaattatttttaacttttgaaattatttctgtattttaccttattattaacctaagaggaaaagaggaaaagattttatctggaaaaaaataagatgattctcaagaaattttccatgaagaacttgccaaaacataatataaaaagaattgtggtttctgaaatttacttaaggcctcctggatgttgatcttttcacactgaagctgatttaattttgcccctgagcttgtaagcaccagataatttgcttgcttggattgtcactgagtctaataagtgtcggtcattaataaaactttttcagaacatgagaatgatgtaggaatggtgcggttatattatgaaagttgagtgtaaatgattcttgggaggaaaagatttccaaattatgcaacgaatggaatttactcaacttttaaagatccaaagggaggtaatatgtatgcagtaatgcttgtttaacagacctgggctgagcttttctacccaaaatagatatattttacataataatgctatatattggtttattataagttacatgagcctggattcctctgtaagtattgcttactttacctcatttcaaattcattatagaattcatggttcttttgtgcttttttagaaaaagatatttccccaatggatattttacttcctttcaacctgcttctttacctcctccaaaattctaaattctgactattaaacatgatttaatgagctgagagtaggtatgttccttcactgtgattacccaataccccatgcatacctcaatcctgccgagttgcaatcttcattttgcctgactatatctcttgtgctaaactactggctcttcagaagcaaggccggctgttatcctcaaggtgtgtaagtcctagcacatgctggtacttgacatatgcttgatatacaaattaaaaatgagccgtgatgatcccaggcactcaatactagtggcagtacagtaaagtggctgagagcaagacggtctctgcagatccttggcttaaattcccattgaaaacatttcatttcatttagagaaatgtcactttgaaaagttctggcattttatgtcctttttaatgctaaccacagttatatttatcttttttactattattcaatgtgatcctatgttgtctgtacttttaacggcactagaaaaaaaacaagtatctccctaccaataataatgagtcacacaagtgaaacatatttaggtaaatagaaattttgctatatttaaccaatcactattgaacttaataccataataaattatacccatttacatttgattagcacttgcaagtttatacacctttcccataaattatcttatttaaaatggcacattagctttttaattatataagaatttcacaaatatgtggttttgtggaaaatctgaagtacaaaagtatatacatttaaaggtagagttctcattaacctgagataataaaattgcattttctccacacccctccaaggtgttgggtgggtcacaggtcagaaaacttagcaagccacgagaggtaggctgacagatggttgggacttagcaggagggtttgcaaagcagtgcaaagcaatgcaaaagaaaaggtttgcaaagcagtgcaaaagaaaagcttgggcctgaaatagaaaatctattttaaaagaagacatattgtgtcaatagttatcacaatgatacttgagagtttaagcaccccaaaagaataataaatcaatgatcagcttcatcagatgtaactgattgtattgcatcactgaagctaatgtacaagaaaattatctgggggaattagcttgcctagtttcatggctccttaaggaagcaataatactaactactctcaaagcaacaagaaggctgtcagctgtaggcgctttcatgtgaaatgcccctatttgatgccctgttagagtccaattcactgctagtgttcttagactaaataaagaacagtagctgaaggatttgctatcatatcataatgtgtgaaaaatgctacagtgtccctttatgagatattaaaactgtatgtaaatagaaataaaactgcatgatgtcaccatcacgaagctaagttttaaaaaatgttcttcaaattcagaaacaacctgatacctatagggaatttagattctttttgactagaaacatcaagagaacaacatacctgtttagttcggcacagtgtacgctctattcttgggcgatttctacatgaaaattagtaatgtcttgatgtcagaaaaccatatttccttttctttttctttctttttttttttttttttttgagacagggtcttgctctgtcatccaggctggagtgcagtggtgcaatcatggctcactgtaggcttaacctcctggtctcaaatgatcctcccacctaatcctctctactagctgagaccataggcatggaccaccacagctggctaatttttttttttttttttttgactttttgtagagacgaggtctagctatgtttcccaggctgttctcaaactcctgggctcaagtgatccttccaccttggcctcccaaaatactgggattacaggtgtgagccaccatacccggccaacatatttactttaaaaaagccttcagcgcggtggctcatgcctgtaatcccagcactttgggaggccaaggtgggtggatcacgaggtcaagagattgagaccatcctgcccaacatggtaaaaccccatctctactaaaaatacaaaaattagctgggcctggtggcacatgcctgtcatcctagctactgtggaggcagaagaatcgcttggacctggaaggtggaggttgcagtgagctgagatcctgccactgaactccagcctggcaacagagggagattccatcaaaaaaaaaaaaaagaaaaatccttcagaatcccattttcttctctatcatcaccatactcatgttcatattatctaagtcttcataaattatattgattacttactctgcttttttctctttccccggaccctgctggtttagtttccagcatcaagtgttaggcttattgccatcaattccttagtgcttttctcaaacctctcttcgctgcagatacgatgattgaaaacaaacacactaacagatatggccatgaaactttcctgtttaaaatccttcaatgatgccctcttcatccaatgaacagttgtttccttaatagcctctagacgcccgcaagaaagagcccaaactcctttgcatagcatgaaagatgtttctgttttttgcctaatgtattgagtaacatgttttgctactctcctcacacctacttttcagaaataacaaatcccatgttgtgtcttgaacaccatatggtacttcccattcccatttactttcacacgccccttgcaccttccgaaatgtcatcgctctctagttcacctggctactttctacatagtgttattctgtgacgcttcctcactatattcggtaaggaaaatgtactacctctgtatcttattattgcttctcttgttgctcacaagttatatatgaatttgttacatgtttatttctcctatcaacacatgagattcttgaaggcatgaactttgtcatatttatcttcctatctccaaaacctactataaaacatgcttcataataaacactcaatgagtatatgtggtttgaatgaatgtacttaagagaaaaaaagatagtaatataagccatgcttttattttaattaatgacattttctagttttccatttattcaaatagtaaaattttactaaaaatggtagttatgtaaacattagctaaagatgacctattggacaggcaatttgcaaataaattattttcttcttagatatgaggtaaatcaatagtaacttagcaatgaagatataaacttagacattatacctatattccagttggaaaggtggatggagttaatgctataaacacttcaaaaaatgtatttctatcctcctaatatggacatctctaatagtttctgcaactccacggtataaaaaccctctgctatgtcctctcaaaacacctcctcaatctgggtcaggcctgcctttcctcaattcaattctatctttatgtgcccatattctggaccaattgtgctcaatggcatctatgctttatttagaataagaccctccaaagtttctaactcttgagtctttagtctaccaatctgttcatcttaagtgaaaattgattttcctctgactccattttccttgagggttatgaaataaaatgagatttggtgttccatcatttatacattacccaccatctattcattcaacaaatatttgggtgccacattcaagccactattccatcacccttgctctaacttcccatccattaagaattatgccatcttttatcaggctttctacatctttgtgctatcacaaggaaactccctcagcttttaattatttgaggacatgtacaattttacctttttttccttttttatatccctggttgcttatgtcaactttcacagtgatgatcttctaacataatagattccatgctttttgatgttcagcattattgttacactttagttttctaccaccctacactttcgacttcaaaaatagtcttttgtcagagacagagtttcgctcttgttgcccaggctggagtgcaatggtgtgatctcagctcactgcaacctctgcctcccgggttcaagggatcctccttcctcagcctcctgagtacctgagattacaggtgcgagccaccatgcctggctaatttttgtatttttcacttgttttttttgttttgggggtttcaccatgttgcccaggctgttctcgaactcctgaccccaagtgatccacccggcttggcctcacaaattgctgggattacaggcatgggccattgtggctggccaacttccatctttataataacctcctctttgcctttcatgcaattgctcttattgaaagtaaatagaatcctttcaataaatatctgtcccagggtttataatgagtcacacttcagtgcaagacatacaaagtagaaccatgtaggaactctattccaatggaagtaataggagctacaaacttatgagggaagcagataagaaaattcaccattacattagactcatataggtgccacaagaagggtatctggagcaggagatggaggtccagcgtaaagtaatgtcagctaaatattttgggaacactcttcaagaatttccaactcaaatgcttccatgaaagcattaaaaactattccatccctctggatgccccaaaagagtttgcataattgtacataacacaaaaataatcttatactgaggttatatttatgacaagttttgtatctatttctaaacggtacgttcttccagcagactgatttaacactcttcgggtcacagacgttttaaaaaatctttttcataattatttggcaaatttatacctatctactctttagggacttttgtacaagctccctcacaaaaatcttctaaagttataagtttattgcacccatttacatagaaggaaactaaaaattaacagctatgtaaggcatctatgtttacctagctagtagacagcaaacctacattaaaagtgaggtatagtggagactgctaggtaatccccccaatttttttttgtttctttttggacatatagttgagctgtatttcccagtcttcaattccattggatttggccataaaacccagttctagttgatgggatgttagtgaatataatgaaagagatttctgggccaagctaataaaaatgccacacttttgctccttggtactcctttcctttttctagagtactgggaggttagtatcttctaaggcaaatgtgaaagtcatgcattgaagatagccaacctgaacatccacttagacaattaaatgagagagaaataaatctttgtgtggaaagttaacaacaaggcaggctctatttaatactacaggttatcctaccttattgaatgcagtagaccagcatttatcaaacattttagtcttaggacctattgacactttcaaaaattatcaaagatttctaagaacttttgttaatatgggttttatcttgatatttaccttattagaatttaaactgagaaattattaacatatttattcattttaagatataaagttagtacatgttaacataaatattgtttttgaaaaaaatgtaaattttccaaaataaaaaaaattgtgaagattggcattgctttacatttttgcaaatacctttaatatttcggttattagaaaatacttacattctcatatctgcttctggatttagtctgctatgatagtcatcgtagagcttctagaaaagtttactgtacatttattagcaaaagaagatgaaaagagaaatatcatctcagtgttactacaaaaatagattcatttcttgaaccagctaaaagaatctcagaggtccacacctcattaatgatcacattttaagaattactgcactagacctttgacaacagaagttactatgttatccactatgtagtatttaaaattcttaggaaagctacgggttctttcctcaaaaaaaaaaaaaaaaaaaaaaaacacatacatacatacttttatgcctaatttaagtggtttcctaaaacccctgaatctcattcaatggaagtcaaaaactttctctagagtagatggcatggctttttttaactttcatgtatcttctactatactgagaaatgtacactttatactttatataatgtcaataaacatacgctagaaacagaaaacattagaactgggaggatcttcagagatcatactgtgaaattttctccttttcacatttagactgtgcaaacctagggaaggaaagtgactacctcaaggccacagtgaacatgataaagaaaggatgcagaaataaaaacacaatttgcaaagttatgacacatcactcattcatatttaaaatctttaagtgatataaagttatacattcaaagagacaaaaatatttttaggattttggaatttaaggagacatataagccatctatttaaatcatctcatttgtaagaaaaacctacaggatctcagaaggattaaactgctttgctaaatttacaaaatggtaaagacctggtttgccaactctgaacagaatattataaccaatatatcacatttccctttaaagaactcacattttatagtcaattaataatctccattttgaagcaaatttataagaatagcaactgatgcactgtatttaaaaatataaacaaaatcttcagaatacaccttaataatccagattacaaaattgtattcactttattttgcttctccagatttaaaaatgaagagagcaaaggctgggaaagttagtcatctaaaattctatcttcttttgtcaaaacaatataacacaaatataaagttattttaaaataaattgttctggcaaattggtaccctgacccaacgaggaggttatgaaatccagtacccctccatacttcattgaaacttactcaaattactgcagtagattttccactcttggaaaatgagcaaataaatggcagcatcctttctaatgtcaattctcgacattctgattaaagttctgttttaagtgcccagatacattaaatcaacccattgttttccatccttacagatagcccagagttctagagaaggatggcgactacaaagaaatcaatcatcaggatgtgcttcttttaacacataatgctgttggttaattgggttttttgaaagaatctggaaagatccatcaaaaagtgggcgaaggacatgaacagacacttctcaaaagaagacatttatgcagccaaaaaacacatgaaaaaatgctcatcatcactggccatcagagaaatgcaaatcaaaaccacaatgagataccacctcacaccagttagaatggcaatcattaaaaagtcaggaaacaacaggtgctggagaggatgtggagaaataggaacacttttacactgttcgtgggactgtaaactagttcaaccattgtggaagtcagtgtggcgattcctcagggatctagaactggaaataccatttgatgcagccatcccattactgggtatatacccaaaggactataaatcatgctgctataaagacacatgcacacgtatgtttattgcggcattattcacaatagcaaagacttggaaccaacccaaatgtccaacaatgatagactggattaagaaaatgtggcacacatacaccatggaatactatgcagccataaaaaatgatgagttcatgtcctttgtagggacatggatgaaattggaaatcatcattgtcagtaaactatcacaagaacaaaaaaccaaacaccacatattctcactcataggtgggaattgaacaatgagatcacatggacacaggaaggggaatatcacactctggggactgttgtggggtggggggaggggggagggatagcattaggtgatatacctaacgctagatgacgagttagtgggtgcagcgcaccagcatgggcacatgtatacatatgtaactaacctgcacaatgtgcacatgtaccctagaacttaaagtataataaaaaaaaaggaaaaaaaaaaaagaaagaatctgatataaatttggacttgcattcaaagtccctgacagaactactgccaagaaacggaaaagtaatgttttcctaaaactattacttgaaaatcttgaaagaaatgacttatgcataagtatttaatagttttcctatgtgaagagctgccaagacccaggcagcactaaaaaatggaacctttctattgtacattgtacttaaacacctggtgtggaggccacattttttcctgctgtgtggcagacaatgaagtgtaatactgacattctctctgaaactctccaagatctactaaataattccctgtgtagaggtagaaagttcacctaagaaactcccaaaaggcacataacctcagtcaagtattagatcttactttttctaacagaagctagagagcaaagagaaaacaactgatttcttcacaatggcaaataagaaataatataacagaaaccattctacatgagtccaaagcagaagctacaacaaattacttaacacaaagcaatagcaactgggcaattcgacagaattgtgaatccacgccatgaattcatggcatcattttactaaaaaacacaacagtggatggcagtctttaggatatatcttgatggacactaggaaacatttaataatagttgttgcctgttgttttgctattttttgttactcaagcagcagcgaagaggggagtaaacttgtgtttacagctggctctctgtattcacaggaaattggttccgggacctccttgggataccaaaatcctgggatgcttgagacctgtaggcgctgtggaacccttgaatatggagggtggactgtactgatcagctcctaaatgtcaaacacttggcactttatatccgttttaattctcaaaatagttctccaggtcgggtatcattattttaattttaaagacgaggaaccaagtttaagagagtaaatactttaggtaaatactttagtaaatacttcaggtaatgccaccagctagtaattgctagaactaggattcaagcagcataaatagctactcacatgggtttatgacatgacgagcactgtgctaagcaacttacctggattggctcattaaatcttcctcataactcttcaaaagaggtcctaatattttactcacttaaaagatgagaaaacaggccaggcgcggtggcttatgtaagcatgtaatcccagcactttgggagactgaggcgggtggatggcttgcggataggcattcaagaccagactggtgaacatggtaaaaccctgtctctactaataatacaaaaattagctgggcatggtggcgcacacctgtaatcccagctactctggaggctgaagcaggagaatcgcttgaaccccagagatggaggttgcagtgagccaagatcctgccattgcactccagcctgggtgacaagaacaaaagtccgtctcaaaaaaaaaaaaaaaaaaaaagatgagaaaacaaaattttggagttgttaaggagcttgcctaatcacacaaatcataagtggctgaacggcagttcaaactgagagtgtttgacaccagaactccaagctttttacttatcattccataatgtctcccaattttaatgtccatgctctttcctctacaggaatggggcaggggggagaaaaacagtaaaattcacacttttcattttcttccttcctctcatccaattcctaaaagagtaagacaatataacacatcagtacttttggaggttcaaaagatgctaatgataatttatctgaaggtttacttcaattgctgaaggaaatgttttctagaagaaaaagagagctcagcagagtacacaactatatccatattgatggatacctgtgcaataaattttccaatcaggggcaaatcaaggccaatcatgattcatcagcagcctaagagacagcatggagtcagacaatttaaaggtactccacatgtcttctgaattctggtctgtttcagatggcactcaatgcacagtctaggttcaaagattttttttctctggctgcacttggtgcaagctgtcaggtctatttttgggggtatcctttagaaacacaacataaaactgtataaccatgaaaaagaaaattcaggaaaaagctgccatttcaaatatttttatgttttttatcatagtggtgggagctctacctttacaaggcaaactgcagcatgatcctggcaacctcccgtgtaaatgcaagcaaattactagacaactgacatttcttgggcagcaaagatttcaatttctacaccctggtttttggaaattctgttctggctagttgtatttgaggttttgacagccaaataaatctgctgcaaagaatgttgcacatttcattaaaaatgctccatctagacacacatattctgtctgctatagacctgaatgcatgattgtgtgaacatgtgagacacagaatttcagtcttgaaagatggctcctcagtgaaactccttttttgtacaaagaaaattagttacttgtgataatgttgcaaaactagagctaataaggtatccaggtgtgttctgatagcaacaacaacaaaaccctacattcattatatgtactggttaactgtgagtaaagagttatctttaaaggaataattatatgagactttgtcaaggcataagtataaattatgctgctgattaattgggttttaaaagaatgtgaataaatttagatgtgaattttaagttcttgacagaactattgcccagaaatgagaatgtaagaagattttggatatttttttcaggacatgaaatgattgtttgaattctttcatcaactgtatttgcttctattttcttatgctgccaatcaaatgaaggcagcaggaaatgcaatctattagacttaatcacataaagtttaaatcatatttaactattcagttgaagaaaaataccagctaaactaattacagaactgaaaaatggcaatgataaaattaagacccaacaaaaagacacgaaatacctaagaaattgagaatcaacaaatctatacaattgtcagtgaagacagtcaatctttgtcattaaataattttaaagagaattatttaattatttctccatcaaatgtcttttatattgtatcacaattaaaattctggaggtctccttcattaactagacgaaattaaaatgatgaaaggtcaatctgacaagaatattgataaattgcacataatgtttcttcttgtttcaaaaagcaatataaacaacttctaggacatttaatttaaaaactgagaattgaaaacttttaaaaatattgtatattccattatagatagatagaaaaataactgtctcattcttttagcttatgggttctttgaggattaaaaagagtatcttattctaatttaggaattttgctagttgctgagtatgtctattctaattatatattctggaactgggtaaaaaactacaggatagatttggggacccactggacccattaatcatatgacttccatcagccctactctgactagtcaaccacagtgacatgcttgtatcttctggaattaatagcagtttagagtcaatgtctaatagtccccaaaggttctgattatttccttttccctaaaacacagtcacccagtaaaaggccatgatttggggttagaattttgttcacttgatctagaactctttgacttacacagatcaagtaagaattagtagcattcccatccatttaacttctaggaactctatcatcaactagccaatgccataggactgcccatattcaactattctgattgccgctttgactctgctttccatcatggtaacaacacccatcttatcttgggcgactgagggctgccacttggccagcccctgccaccccaggattcaattactcccattacatttaagtttccttattcagtggtagcagttcccactgtattttccggcagacaaaagcaatcacaaagctcttcaaggatgcaggggtgcccctcataaacttgttttttacacttaggatgaaaagtgtgccctctgggtcatcccagtgtaagtgagcagatcttaaatgacacattcaatctaacattccagtctccctaaaccttggaatctcttattctgcagtacaggaaagcagttctagcatttcaagttaaattactgtgggccagcttctgatccatgttccagccaaccaaccaaccaaccaaccaaccaaactgatacagccctttctcaatccctgagctacagcattaaattcagaatctctgcttaatgagtttctttggatttgggaggcaatacatttcttattctggtttgctaccccagcctagtaacagaatgacccaaaaagctgctaacaagagaaggctctgcaacaggtctaggctgccatataggtgccctgccactggggtcatatgatccagcagattcaatggtgtttaaattgttggtgacagatagggattctacttaaaatctttgacaggaccatacaggacaaccatagtgcatactcagaatttcagaccaaagccctgccactctctgcagataactactttccttttgagaaactgcttttggtctactactgagctaaaagcctaaccatggcacaccaagttcttctgcaaactgagctgctcctcatgaactggccgttacctgtcctaccaccaaggcataaagttggctgtacacaacagcattccttcatcaaaccaagaagtggtatatatgtgatcaggcccaagagggccctaaatgcacaagttacatgaagatgtgtcccaaatgcccatggtccccactatgctatattactacatctcttacaacctgcacctatggcctcatgtggagtactccactgtcagttgacaaacttgggtctggtttacagatggttgtgcataatatacaggcacatacaatagacagccacagcactacagtccttttctagcacatacctgaaggataatggtgaaggaaaatcctctcaggcagcagaaccccgagtagtgcatctagttgttcactttgtttggaaggagaaatgcaaatatataccaatttatgggctgtggccaatgatggtttctctggatggtcaaggacttggaagaaatctgattggaaaattggttcaaggaagtttggggatgaggtatgtggatagacatctctgaatgggtgaaaatcatgaagatatttgtgtgccatgtgaatgctaaccaaagagagatgtcaggagaggagggactttaataatcacatagataggatggcatgttctgtggataccagtcagcctcatttttgcagccactcttattgcccaatgtattcataagcaaagtggacattgtagcagggacgtaggttatgcattggctcagaaacacgaacttccctctccaaggctgacctacttatagccactgctgagtgcccaatgtgccagcagcaaagaccaacactgagttctcaatatggcaccattcctcagggtgatcagccagctacctggtggcaggttgattacattggactgcttccatcatggaaggggggtagtgctatgttcttactagaatagttacttactctggatattgatttgccttttctgcacacgatgtttctgccaacactacctactatctataaacttacagaatgccttatgccctgccatagcattccacacagcactccttctcatcaagaaaattacttcatagtaaacaaagtgtggcaatgagaccacaatcatggaattcataggccttatcatatccccaaccatcctgatgctgctggtttgacagaagagtggaatgaccttttgaagactcggttacagtgtcagctatgagacagtaccttgcagagctatagcatgatcatggaattcatgggccttatcatatccccaaccatcctgttgctgctggtttgacagaacagtggaatgaccttttgaagactcggttacagtgtcagctatgagacagtaccttgcagagctgtagcaaagttctccaggagtctacatatactttgaatcgatatccaaaatatggtactatttcttccatagctagaattcatgggtccacaattcaagtggtgaaaatggaaatggctctatttactattacaactgatgacccattagcacaattttgcttcctgctcccatgaccttacgctctgcttgttcagaagtcttagttccaaagagaggaatgcttctagcagaagacacaacacaaattccactgatgtggaagttaaaattcacctgatgactttgggctcttcatgcctctgaatcaacaagcagggaaggaagttacagtgctggctgggataattgatactgactaccaaagagaaattgacctggtactctacaatggaaataaggaagaatatgtctgaaatatagaagatccttaaggcatcccttattattgccatgtcctgtgattaaattcaatataaaactataacaactcaatttgggcaggactactaaaggcctagatccctcaaaaataaaggtaaggtgacccttaccagataaataactgtaacctattgaggtacttgctgatggcaaagagaatatgtaaatggtaatgaaataagagttacagcgatgtaaccagtacagaaatgggaactgtgtcatgtgtatttttctttgttattttgttatgaatatgttcaagtgtgtgcatgtgggtatctcaaatatctgttttcttccctctcttttccccttaccatataacatgagatgtattgactttatattatagtacttaagtaatgttaactttacatcatagtagttaagttagaggacattgagaagaataatcatcaaaaagactttcaaggattttgcatcctcttttaggggaagggttagtgcatttttagttgtacacaggatagtagtattaatcatgttaagcaaaagtattgccttgttattgtctttaattggagattaattttggtttaagatgtatatgagtgccaggtttacaaaaatggactcatgatggttaattttatatgttaacacggttaaatgatggtatccaaatatttggccaaatattattctagatatttccatgaagctattttttagatgagattaacatttaaatcaatggattttgaggaaagcatattaacctcaattgtgtggatgggcctgattcaacagttgaagaccttagtagaagaaaactgaccacccttcagcaagaagaaactctgcaaggagactgccttcaaacttgaactcttccctgggtctccaagctgccagactatcctgcagatttttgacttgttggcctccataattatgtgagccaattgtttgaaataaatctctagactgatagatgatagataggtgatgatgatgatgatagatagatagatagatagatagatagatagatagatagatagactggcagaaagatagatagatagatatcctactggttgtggccctaattaatgtatccccaatgctttactcattaaattttaaataaactttttctttttcattttacatatcagaaaagaaaagccttctaagttgtgtaaggaacggtgtcctggttttaaaaaaaaaatcaaacaaaaccttggaagagtaatttgacattgtaatcctttcatttcacagcaactccatgaactcaagattgcaatgtagttaccatctacagagatccagagtcagtttggattctacaattgtaaatacacaagcagaatgaacttccacctgagaaatcacaaatcaaatctaatattacttttggaggaaaagggttggagaaattccaataaggtaagcttacagaactcatgtccaacccaagctatagaagagccttatggaataaaccgaaagaactagattgatgggaggcacagccttgttctgtgggaagtgatgcatatcttgaggggcatagatccaaattgtagacaaattatataatcttggcaataagacttccatttccaatccttgattttcacatctgaaacctaatgaaagtgcagcaggtaaaagcagcagatgaggaaggggtaagtccatattcgaagctaccctgatccccttactgtttctgtggtattattattttagtcaacgcctgggtttactctgggcatctcagagtccgctggaattctgggtggatcccataaattctccaatagttgtctcagtacatttagtaatttatttataccttaggttttgttttggttttgtttcatttcattttggcccttaaaatgggatactgcttgtagtttgtagaaggctttgttaatttattttgatttttgatctctctatgatttatcatatgtcttcaaggcatattaagattctaggaaagaaaactggtgtagtgaattcatttttctaagaatcataatttgttattgtttgcaaataaatatctgagactgtggaatccaagagtatctgagcttaaaggtaccctagggtaccagagataactcttattgaacattactatttgccagatgttgtattaatattaccttctttattcacagaaataatcattagaatagcaataattaccaattattaagtacttgagtgtgtgcataagcactcatgatttttacttaaaataaaattcattccagtatagctggaatgtgttgcaaacatattaattcattcaatcctgaagacaaccatatgagttgtaccattatttctcctatgttatagatgcgtaaaatgatacagacaggttaaataaattgcccatatcatacatttagtaagcaatagaaccgaaattcaaagcagagactagctcccaggtctgtgtttttaactactgtattaagcggttaatggagtttccttaataaatatacattgttattattctcatttaagagataaacatctgaaagtcaaattagctaaataccttgcaaaagtcactgtccctaagcaatgagtatctgaaatactagtgcactttattctcgttacaaaaccttgaaatacttatatgcccatagaaaatctagtgaaaatccagacagatcccaattgtcacagattgggatcaataccactattctgtctaggctcttgtgtgggacagttcccagtctaagacctcatatctgcctatctctgtgctgtccttgatcgctgaaccaagccccaaacctatactccacaatttcacgtctgtctgggatgcgctgctcagatgggctgtatgagtggcaacacaaccacttcaaaaacagagactgtctcctcctgccatgggtagcaatgaccacaactctcaaatcattttgccactggatactaacataagagcaaaagactctataattaggtgatgaattcagatcattggagcacacattttacattaaaacacttctgtggcttcactctcaatgggcacactatttcaaatgcactttgttatctgttgcaatatcaccagacctgcagtaatatgctcaaatctcatttcctccatgaatccttttctgattcctacagtcctaccaagttgtctctcatctgaatcataaagagcgtatcactcactttatttctaccaccctaatccttcattgtcttgatttctccaacaagatattaatcttgtcccaagtaaagcctacattattatcctccacttggccttatgctgtcagactctgtatagtagattctataatattgctcccagtgaactgatcaaattggttgagttgccaatgtagttcccactgcccggaataacatcatatccaatcaaatgtctttcttgctatcctattaaatgtgcttacctacagaagttaagtctacctcctcagtggcttcatccacctcttcattaatgagtcaatattgttgtctttgttggtataaagagtaagaagaagcacatagtgtatttctgtccatactaatataaagataccgaattgctatattgaatcgctatagaatagcgctaaaccaaaaatttagatctccaatcagatgttctttttttttcctacaagattttaatgaaataaatactttaaaaatgtcctggtatttacattttcaatttaacagccatgccccatggttggcaaatgcaagcgcatgggacatggcaatactataggtgatttgctctccattgcccaagtgtggcaacccccactctcttggtttgttactctccctggcactatccatgaagttattaacacatgccactgattatatctatggcaaatcaatcacattctactacccattgcattaaacatgaacaactttaccctcttattttaatagcaaatcagggagtcattatttagaaggcacaatctcaaatgagaaggtaaaatttagatttacaattttattttcccccaatttcttctaatcattcttattttcctagaataaaaaaaatctagaaagttttgaggggaaaaaaaaccacaacagtttttcagtcttttgtaattgaaagtgaatagaatggtgatttgagggtgctccagaatcctaaagtattctaaaacaaagactacattttccttctaaaaatatatgtttaatattaaatatatcttttaatctaattatctttgagttgcagtttatcttatatcttaattatattttagttagccaccatactatatttattaaccttaccagaaaatatagtacatgcacatatacacattttttggaagaagaataatataaataaatgttgccagaattctacagggaaactgattactacaatttatcttcctaatagcgaacttgtcataacaattttaaacattctttttcattctatctctcttatcctgatctcatattaatatgagatcaataaaaaagactgattggaaggcaggggtgggcactggccatggacccttactccgtgcttatcatacacaataatcctcattttattccattttctgaaaaagacctactcctacagattattattaagaagttgacagataactgagaaactcatgaatagagaaaaaataaattcacatcacacatcacaaaaaagaacaattagccaattagtcaaattcctttttgagatctgggttcttgtctgttcattgtccctcatcttcctgctaactagtattctctctgtgtccatacacaagacatgaacttgaaaaatcattctattgttctcaacatttcagctctggccctcaacttacgtaccccactcaaccatatcacaactcacagaaaaatcaccacaggctcctcaggcctgccccttggaagacattctgctacaatgatgctttttttttttttttttttttttttttttagacagtgtctcactctggtgcccaggctggagtgcagtggcgtgatctcggctcattgcaagctccatctcccgggttcacgccattctcctgcctcagcctccctagtagctgggactacagacgctcgccaccacgcccagctaattttttgtatttttagtggagatggggtttcaccgtgttagtgaggatggtctcgatctcctgacctcgtgatccgcctgcctcggcctcccaaagtgctgggattacaggtgtgagccaccgcgcctggcctacaatgatacttttaaaaaacagatgaatacactgatgtccttcatccctgcaaaacgaggtaaaccatataaaaatatactccaaaaattcattttaaagcaatttctactttaagtccagtaagctgtaatgtcacatgttttgtatgtggcaagtgttttaatttattatttaaaatgagaataaatgtgcaaataagcagtaagagctcattgtatgaatatgttatagttcagggaagaagacactgagactgtgtgaggctctttataaactgtttagtaattcctggactctggtaaattatggggagatgcagtttacagacatggtaatatcttgcctgaaatggaaagaactaccagacacaccttccacagtctcaagctctaaatcataaatatgttgagccagtcgtttacatcaatttcaaacacgaagggcagagattagagacacattcaatagaaagtataaattggctgaataattatttgccaaaattttcattcacatatagatcatttcaagaggaaatcagggtaatcaagcattggcctaactctgaagtggcaaagtagggttgtttagaaaggaaaaattctgtcaaatttagcatatttattttctgtttacataatctagtagaggccccgcacatcatagaaagtcaaatatttgttcatctgattatgacatgattttaaattcccttgtgtttgctttatgatatatactcctgtccctcctgtttgaacattttatggaatgtcagtttggttataattaatatactctagctcgtgttcagtatcgagtctataatgacttaacattctcaatcaatttagtggaagataaagacaggatgttgaagttcccctcattccctgacattatagcttacattgaatgctgaagtacttttgtttctagatgaccagttacttatagttattttggattggtcattaggtatattggagaaatcactgttaaaactgtactggaatggcctagaggaaaagcatcagaagagaaagataattaaaaggtattattaccatcatctttatacagtgctaatttttaacaatcatttttacagtcatgtgaatgacaagtagatgctatccagaattcccatcattggagcctgtatttcattgaattaacactcaacaaaaacatgctaagtgtctcttaacattatactacatactgatgctataagaaagagataaaaatgagaaggatatgtaagacagtatggcaattgaaaataaatatgttcaaaataagtacctctcttgggtggtaaagggataataggaagaatgggatgtcttatggagtagttagttccctacatctagggtgttttcaagcatgtgatccatagtgaaacaggccttaaaaagtcccctgtagggtaataatttgtaattatttattggctatttatgtcttgttccttttatcctcttcacggctccttttgcaaatgcctgtatttctgtgtagttaagataaagatagcactttttaacttgaagccttgcaaagtgacattttctccaaatgcacttggtgaatttttttatacaactctaaactagagctgaatcaactgtagggaatgtgctgaatgtccatccataaagggaaacaagattaatgacctctaagtgtgaatgggcaaaagcaatttacaagagtgagtgagggtcatattttatcacaggcaggtggcttattccaactttgcaaacagttaccaaaaatgcacacaaccacaaatctttggcctttccatcctcacgtgaaaccattgtgtgtgccagacaaatgatcctactatgttttaaccccaaactcaatctgcatatgttaatgaagactaaaatagattgctagaaaactccttgaagcagaaactaacagaaaaagcattttccttcccaacccactccacaggatctgtacttcacccagcaagaaaaggagcatgaaattttgcttctcactatgtggaaaacccttaatgcatgttctgctaattttggaatttaaaaattttctttcaccttggactttgtccttgttccagtgaactgtgacttcaaatcagtatatcatatggtgtttgtttttatgtttttggtagtcatagtagggggtgttagaaggtatgtaatatgggaggacactggtaaaatctttctagtacaaatcataaaataacaaaaataaaaacacttgttccaatgatattggatctctattcttctccttgaggtttatgcctctagcataatttgggcacagcccactctagtactctctaaataacctgtgcaagttattatacttctgcatatctgaggtcaggaaagaggggtcagacatttggaacaaccaaaggatattagacctagtaataaaatagagagccaaaggatattagctgtctactgctgcataaaattttacctaaaacttagtatcttaaaacaacatgaatttattatcactcagtttctgcgcatcacaactccagacatgaaataactaggctctcttgattacgatttcacaaggtcaaagttatgatgtcagccaggcttcatttccatctggagtttgggggtcctctgaaaagctctcgtggttgtagcagaatttagttctttgcaattgtaagacaagatgcctattctttgctggttgtcagcatggggccactcagctccttgaggccacccacagttctttgccatatggtcttctccatctttaaaagtgagcaatagtgactctcctgctgaatccctttcagatttcaaatctctgttaccataaagagccttgcccttttaagggctagcttgtgtagatcaggcccactgaacatgatctcctttctttaagtaaactgtgccaaataacacaatctaattatgagagtggtattatggcattgcatcacaagcacaggtctttctcacagtcaaagggaggatattctacaagagcatggttcattggggcttattttataattctgtctaccacataattcttgaagggagtatcataaagccaaggcctgaggcaaggcaagtaagctgctatcttcaggagggctggacagagaaggcaaggagagggcataacaggaaatatggatgttcacatgagtgatgactgccatctaatgaagattagggataaagaggatattttgtccaagaaatggcattgttaatactccatctcacaactgtttagagaaatgggaataattttgttaactgcaatttaccacttcctaatggaaaatattctagcacagtgaccttgtgtgcaattgggtgaccaagctgatgtctaccaaccctgggtaaagccaattatgaaatatgatgaatgctgaatgactcaaaagggctttacataattagcaagagccaaagaaactaatgaattcttttacaagaacaaaacataacagcaacaaaacaaataaatgaaaacaggatgtccttagaatcctcaatataggttgcaagttgaagactttgatggcagactttcaggattcaaatcctaactttctaacttactaagtatttgaactcaggtaagttattgaacttcattttatgtatatagagctacagatatatacatctatgtatatatatagctatgtaatacagatatacatataaaatgtatatataatttggacaaataccagaaaagtagtttgtatataatacaaagtcattattactagttgtttatagtcctcttaatattactggaactaaagtttgtgtgtctcagccctaacaccgacattgcgaagttccaacaggtctacacctctaacacttctatatttatttatttgctcatccatctaatcttctggatggtaaatttcttaaggtaaaaaagttgtgcttctcattgatctaccttttagtggacaatttatgctggcttgactatcacaccagccttaacagtaaatcatccttgtagtataagttttcagttgtggcaggctttgtcagcaacttattcattttacatttatacttctagcagaacctggattctgttaggggcaacagagtgtcaggctctttggcccaccacctcttttggtaccattttgatgaaaaagtatagggagaaatacctcaggccttcctgtctaaaatggggatgtcaggtgggaggtggaacacccacttagtgacccaaaggaatattctagaagacagacacaagctaaagacattaggctgaaagatgtaaggagcctgagacattggggcctgaaaacctgctgaagccatgctggaaaggctactcctgtgcttgctgatatataaggaaaataaattttccttgagccacatgctacaagtgccaaattttccattgagccatatgctacaagtgccagatttctgttaaatgtagcctggtacatgttttaactgctgcaacagtgtattcagcatcggaggccaaaagatcaccaaagagatcaccaaagaatacagttaatccatattaatgtcatcttctgccacttgatgatatataattggatgtagagccaccgttcaagtaatgtgagtgggagcaagaggaagcaaacaaggagaataatgcagtaggatgtgcttaagcataacttcaagcaatgtggagcaatcatccattgctgggcaacagagaaaggtttccatttagtgtttcattttgcatgtgatatgtcatataattcaatccgcctgctggggaaagggaaccacaaacagaaaaatgtaaatgtggctacagacttcaagagcaccagacctctctggtgatattccacaaattcattatgcacctttaggcaaatactcacatacccagaaaagtgtgtgtgtgtgcatgcatatttgtgcattgcaatgtatctgtttgtacataatgattagcctgttcattgttgaaattcagactaccactgttgttagaaacacagacctggggcacactgcctgggttaaaattccatttctacagcttacttctacagcttagcagcataaactcatcttcaggcatcagctttcttatctgcaaaattggtgcaacagatcctgtttcacaggattattatcaggatgaaataattaatatgaggtacccaggacaggagttggaacagtcttgtacatgttagctaatatcagttttacaatgccgtagaagtaaatatgctctcaattgtgcatgtacataatcgtgggtatacaaacacatacatacatattcatatatccatccatctatttctatatagataaatgaaaaatccattgttgtgatatgtgtaatgctagtttacatgttgtagagccttatgaattttagagtccagcagcattaacaacagctactacttattaaatatttactaggtgtcaggggctgtgcatagcactttacttgcattgtcctgtttaatcctcacaacattcaaagatcgtaggaagtattattataagcacagtaaaggattagttacttgcctgtggtaacaaaacaagcaggcagaggaactggacttagaatccaaatccaaatctctcagtctccagagactgaatttttgtgcttgatgctgttatttttattttttgctccacttattaacttagatgacatgtcacacctgaataggttgaagaagtcctcatttaggaaactcaaataagtttctattaatactagaaagtactcgagttaatttcaacaaacaaatctcttatttgccattaacctatttatatcctaggatagtagtgcttggaaaaatgttacaacaaagaatagatagctttataatgaaaatcagaagtatttgctcaatcaaatgtggataaactaatactttctgctcattcacacaagaagcagtcaatttacagttaagtatacagaatgaaatgtaataaatttctctagcatacacacttccccaaaccacacagccctcagagtatcatataattagttccttgccacttgctgaccatttacttttgcaattgttacttaactgccttaatcgtgtacctggtgcaagggcatttagtcaagaggatgcaatctaaagtgtattccacacttccactcgcaatggcaggtgcctaggacatagatgcattcacctaggaaaaggagtgtcttttttctaatcagcactaaaggctgatctttgctaacaaataccttgattaaaatgttttttttttttatctaaagatacctaaagttgtttgatacctctagataaaagggctgtgccatcttgttcatcatcacccaagtacctggggaaacactgggctcatagcaagtgttaagtaaatgtttcattagaaaactgggccgggtatggtggctcatgcctgtaatcccagcactttgggacgccgaggcaggcagatcacgaggtcaggagatcgagaccatcctggctaacatggtgaaaccccgtctctactaaaaaatacaaaaaattagtcgggtgtggtggctgacgcctgtagtcccagctacttgggaggctgaggcaggagaatggcgtgaacctgggaggcggagcttgcagtgagcagagatcgcgccactgcactccagcctgggtgacagagcgagactctgtctcaaaaaaaaaaggaaagaaaaagaaaactgtatgactagtctgcaaagggtggaaagaaaaattgctcctcattctttttttctttcctatactctgcatacttaagggttgatgctacttcctaaatgtcctcacccagaatatctgtgcaatgccaataaaacgaaagacccaggggcctaatgtactattccatccagaaggcagcaagtatatgtgtacagcataacaaataacaagattagatcccatatgagctctcttttgcataatgaaattccacatgttaaaatgcagatttattttaagccctagaagtgctgaccatatgcctcggtggctgaggagatggctacttaatagataatctgcaatgcaagccaaagaactaatcatggccatctgatcatcatgccccatcaaaagccgaaatgaggagacagggaacagagccagaaactgccaacacattttacaagcagggagagaccacgagtctaaagggagggcaggagggataaaatgaacatcttcctaccctaagcaacataacaaaataataacaataagaacatggctgttttagagtatatttgtgataaaacacatgctccactaaatgtattataactatactcttatttaatctcctttcattggggaagttgatgagaatattgacatcacataaaggtagaatattttccaaaacatatatcctaaaaggtggggtccctgatcttaattctgttcacagaacccaagcttctgatcactatcctacagaagatggcacatcatgcatgctaaataaatgcttgttaattgaatgagcatataacacagagaaatcaagtgtttgtcattaagtgcatttaacagatcaccatgcataaatttttgccccaaatgtgttctgcaaaatattgattattatgaatgggatggctctaaaatatcttgggcatctctctgccaccttactagtgggtagaggacagtttatccttaactgatgactgagaatcaggagctaagctgcatgtctttgaactacttaatctctgtattagtttgctagtgctgctataacaaagtaaaacaaactgagaagcataaacaacagaaatatattgtctcacagttctagatgcaggaagtccaagatcaaagcatcagcagggttaatttcttctgagagtagtaaggaagaatctactccatgtccctcctccctagcttctggtggtttgctggcaatcttggttttctttagcttgccaaagcaacaccccatatctctaccttcaggtccacatggcatccctcctgtgtgagcctgtgttcaaaactctcctttttatcaggacaacagtcacattggattaagggcccatatttctgcagtatgacctcatcttaactaattatatcttcaatgatcctatattcaaataaagttgcattctgaaatattgggggttagaacttcaacatgtgaatttaggagtgcataattcaactgctaacagtctcttttatttatttatttatttgcagtttaataactttatttgacaccgagcagttagttctcattgaaatgaactgtagatttttgaaagtggtgacaggcaaaataggtatacagcctgtttggtgaatcttcatctcattgcttttcaggacagccacccaagagtacaagatagaacatttcttattcctttatgccacatagctttgttgagcctggtatcaatgcacacatctggagctctcatctctttcatggaaaatttccagatctctttcagtgcccataagacctactacttgaatcccactccatggatgcacctctaaatattgatggtgtatcctctggccaccttcttgtcgatggcaaaatggcccttcttcttgactttctttatgtgagctattctgccaggctcaggttggaaaggaaccataacagtctcttacatctgagcctttgcacacgatgttccccacacttaggatactccatccaccactgtccccatcctgacctccacattcctttcaactgactaattaactgctcacatcactgctaccatttcccttcattcaggaagccttccctgacccaggtcaataaatgtcagctagtgtgatgaataataataacagtaataatagctgagaaatattaaccaccctgagtagtcatgtggcaataagagaaagcactattgagacttttcaacgctgctctgtgatcacttgctttttaattcttttatcagtctttttttacttgctttttcgttattttatttattaaagaaattaagactgtcagtgagcattagtgtgttgcgtctgttggcttattattttccggtccatgtctttttgtgattacagatctatagatcatgtgtctgatagactccctttcttcattccatactttgtgactgaatccaggcaaggcaaatcacttttaattctcatttcctcatctccaatcaggataaaattcttaggctgtagagttgatgtgagaattagagatacagctaagatagtgctgaagtcataataggcactgaggtactcattatttgatatattatagtagttaggattattatttatgaaattagaattattaatgtttcttctactccacaatgtatcaaagtagaaaagcactgatctgttggacttatctgtaaaatgagaataacaggactctgaatgaggctctttctttgagtcaatgtgtaagggttcatgtacagacctctgaaatctactgagattctttggaaactctcttgacttgtctttgaccataatttgatgttcaatgagtctgcagcaaagtgttattagtgttttatcaaatggtttaaacataatttttttttttttttttgagacggagtctcgctttgtcgccaggctgcagtgcagtggaacgatctcggctcagtgcaacctctgcctcccaggttcaagcaattctcctgcctcagcttcctgagtagctgggattacaggcacgtgtcaccacacccagctaatttttgtattttgagtagagacgaggtttcaccatgttggccaggattgtctcaatctcctgaccttgtgatcctcccgccttggcctcccaaagtgctgcgattataggcgtgagccaccgctcccagcctaaatgtaattttatttaagatacacagcatacagataaatattgaaagcaataaaaattctacaacaccagataaactttctagaagcagacttttaaagacctcattaaacatactaaacatactgtaattttacttctgcaggaggtaaaatgattgtttatctaacttggagaagccttccatttcatcttaagtaatgcatctgtaaacataataaagttccagcctgtgaagagaacatcacatcacatcacatcacatcacatagggcacatcccttttttatttttttgagactgagtctcactgtattgcccaggctggagtgcaatggcacgatctcagctcactgcaacctccacctcctgggttcaagtgattctccttccttagcttcctgagtagctgagattaccaggcctggctaatttttatatttttagtagagacggggtttcaccatgttggccaggctggtcttggactcttgaccttgtcatctggccacctcagccccccaaagtgttgggattacaggcatgagccaccgcgccaggcccacatagtgcatatcctttaatacaacacactttggttttgatggggtgggggcagaatagtgaagcatacagcatgacatcattgaggatcacaggcctgaattccctcactgcattgccctgtgacctctgtctcccttgtgaagtgacaaggtcggtctaaatctttccttcagctttaggatttcaatgattctgtaagttttctccaataagaggttggttttgcaatagaattttaaagtcagtttgccaatgtattctatagataaaactgaattagtaagtggacctgttcaaagtctctctcaacaatatgtataatttaattagcagtttaaaaagtagaccattgattattagatcagccacctgtagaaaatatgcttttgtgcattttatggtgtgatattttctttcaaaagtgttactctgtgtacattatgtcattttggcataaatattttgtttatcagagcatctcattgcctaaacatatgagacaaaagataatatgattatcttatatattttgattagatctagtgaagttaaaactaatttttaaaaacctaaatcttgggttaatttgattcaaagcagttttaaccataaatttttaaaatcttactaagaatctctcatctctttattcatactcctggatgaagctaacagatgcatattcttcaagtgcagttctgattatgcatttttttgaatgaatacatttaatggttaccttactagtttttcaataaaataacaacctcttagcctggtagtcaagtccattttatttctatcttcatttctcctcagcattaattttcattatttttaatgcatcaaatacattttctaagccaccatttcttcatctagagatttggataataacttctacattttaggtaattttgaagattaagaaaaattaaatttctgtggcctagggtgagtacttaataaaccacaattattgattgttattattatttttgagaccccatgataaaaagaatatgcttactttaacagaagaaaacatggtttcaagtcctataccttacttgttattcctcatttcaggtaggttaattaatcttcctgtgctctcatttatttatttgtaaagtggttatagtagatgattaattaataagaggatggacttaaatacttgaggagaggactctagctaaaagcaccaacaagagtttgtttcccttttcgtttgttccatgtgtagcctatattttagctataggttaatcaccatttgtttaccatgtctttcctttcctaacactaaaagttttctcaggctagtccctcaatctacaatgtgctcctatatcctatctatcaatactttacctaaggcacagctgagatatttcccttatttaaagtcttaggatttttccaccaggaaatatcttccctatcctgtgtaccctcttttatctttccaaatatacttgtatatgtcctccttatttatatatacctcttgcttcccttacttagactataatacatgaaaggcagagatgggagcatcattcttcatatctcctaaatgacctttcccaatggcttgcagataagaaacattcaataaacttaggttaactacactatgatttttctgtatactttggtctctattttaaactccttgtctcccttctaaagtaatttctacatttagggacatttcacatcaagcagaatatataacatatttttactttccattgatctacccacatatcttttcaaatcttccctgaagttgtgctatcataggtagtcacagatgacagttggaaaagacaagagtaagtgcagctcaggggaatttcaatagtagactaacatgccctacttctggcatctgagaaaaaaacagcaagaaatgagaaagacagcactgttaacttggacctggaggttagagtgggctcatgagatgtggggttctctgtccactactctaaattgttaatgctatccttaaacaggtccaagaatctatgcttgaaaattagttcccttttctagtggtggttgtagtgatgacagtgatacttgttattttcatttatgtagcaatttcacttatatatatctcattttgacatggacaggaggcagggaaatactggttagaaaagggaggttccctagaaaaggccccaccctcaagcctggaaacttgcagccctaaatgagaataagcattcctgttttcgtgcccaaatgttgccttttccaagaccactctggcctgccatgcccctattctgtgcccatataaaccccaagctccataggcagagcagcagagcagtgtagcagagaaggaaagaagagaggaagtgtctgaacacatcaagagaagttcttctgggacgacaggcaaggacatcagccacgggacggctgaactcaggggaacatcatctgtccactccatctcctttccagctccccatcccatttagagccacctccttcactcaataaaatccccacattcaccattcttcaagtttgtgtgacctgattcttcctggacactggacaagaatttgggaggcagtgggtacgggaacccaaaaaggctgtcacactgactcttcactgagccgcttaacacttaagccattcttggatagctgggctaaaagagcactgtagcactcctggacactgccatgggtctggagcccaaaagtgctcactctggctcctgcacctgctcacttgtgtgctcccactcccataaggggtttgagcatgccacatccacgtcacaagtcccacaagggggtcagggaactctcccatttcaatttgaatagcaatccagttctcagaggtagttgttattacatctatcttacctatgagaacactgtggctcagagtgatgagccaaattggccagagtgactaagacactcatccgatagaagattctagacaaaatctcttctcctgcccccaccctccaccctccatctagttcactgccctcgataggttcttttatcccttcactttttaactggcatctctgaaatgctgaggggcaaaaaatgaaagaaaagataaaatactagtgccaaaggcaaagaagaaaataccaaacaattttagtgtaaaagtaactaaacgtccttatttctattaaaaaattagcttagatcggaactatataaggcagttttctcgctgtaagagaaaattttcagttgctgtaaagggtgacacaatgcgacccaagtgatctgtagacattttaaaaacagggctgagtccaaagtgccttttcagaaaggtgttagggcttcctcacaccacctggacaaaggggtatttgcttgtaagcaacctctacaagggtatttcatacaccctgtgtcctccacaatctgaagcttaaagaaatacaaagcagagtcagcggtgccctgggatgtttctgactttacaggtctgtcgagcttgggaagatactgacatttgttatatttttcttaaagccttttccagtaataaaaagtacatcttctcttcatttctaccagatgtatttttatttttgtccataaaaaatgtccaaagtcacacagtttacaatctgaatgcagtgatttctccgtaccaatacatatcacagaataaaataaaagttgctcactggcctgaaagatgggctaccataacatctgcctacaaagtgatttgctaaacagcattggaaatgcatatcccattaaaaatgtagcattagggaattcatccagaataatgacagaagcacaaaagcaggattaattagaaccctatttctttctacttaggcctcctatgtaacattatcttcatataattttgttttgtggtctaaaataattgtttctatataaaaatgattgtaatagctttgcagttgtatgtgttcactcttaaaaaccacagacttcatacacagaattactagaaaaactaaagtattaaccaagaaaaagattcaggctggtactggacacataaatattgttttatcaggaaaaaagaggagaatttggagagatgttacaccaacatcctccagcatttcatgttttccaatggaaactgaaacagtgtttctaataacttgattcaagggttattttacaaagaaaataaaatgcaaagatatattttacatcaataatttgaattatacaaaaaagaagaaactattgatcattttcttagaatgttactataatagctatttccctagaagaggtttcaatgcagtcaaattttgatcaggcaagtgggagaaggttaagaccttagaggcctatttcaggatatcagggaaaaggaaacttgtaaaataattgtaaatcagttttctaaactgataatgtagcccttatcgataatggtttctaacttactaatattcttgattcttttgagaaaagaagttatcgatgacattaaatggatgacattacttaaatgtcatcaaatggttaatggatgacattaaaatgtgtatcaaggtgattgtggccttcttttttaaataaaaatttttcctaaagtgtgtagattgttgaggattgtctgcttactgtgaaaagctgatgcctgtccacaagggtagcttggaggtgcccatcggaggaacatggggagcggagtgtaagcctttgggagcaccgtgctatgactgcagatgctccctggctgctcagagcctagctgtgactaagccaaggctactctactacctgctttcttcatgtcttcaatggcttaggactggcttcataactagcttctggttgttgctcactgacccacacaggccttgaacctgtgatcctgaccttgcttgttctaaggcctaataactatgagtggtgtctaatactcactgattcttgaaaggtcctgtagaacccaataagcttccctcaggcacttctgcacacactctgggacatcctttcagcaagtccattccagaggagtttgacatctacaaaacagaaatccccatgctagatccttatacagcttccaaaatctcattctcacaacagcactattttgttggtatgatatccaaggtaaagaatgatgttgcaacttcctcagagtcacagtgctaaataacttcagagctagaattcaaacttaggtttttttgtttgcttttgttttgtttctttttttttgagacagagtcttgctgtgttgcccaggctggagtgcagtggcacaaccttggctcactgcaacctctgcctccctggctcaagtgctttctcttgcctcagcctcctgagtagctgggactacaggtgtgcaccaccacaactggctaatttttttttgtacttgtagtagagacaggtttcaccatgttggccaggctggtcttgaactccttgcctcaagtgatccacccacctcagcctccaaaagtgctggcattacaggcgtgagccaccacacccgacaggtcttctgatacctctattgctaatgctcctaaactgcacagcagttctgtgaactagtcacatttaaaccacctgcaaatgctctgcagtagatagacctgtcaaacaaaaaacagaggcaaccaaaacaaacactctccctaacctacttcttaaacagagacaaaaaaaaaaaaataggaaccagagaaagcaattattcccatagcatatttaaaccagataaatatttctgcttgccatcttgcaatttgaaagttggaaatggcttatggtgagttaaagagtttggaatgtgggcctatctaggaagatagcaaagtcgttaaaagtgaagtttctgaggtcaggcacctcagtttatcttctagctttgttgtttatgatctaggtggctttaggcagtttgcttaatctcctgtctctcagttgcttcccagatatacactcgagagttgaaaaataacattcttaatataattcctgttccttcatctcaccatgccacctatagactattttttaaatgcctatggactattttttaaatgcctactgtgaagacttttgtgcattgcacaactttatggcattgtttttgcattaaatgttttccatatataattataaaattatcacaatagttgttgtgacatgatttggtacttctttaatttttaataaaagcctaaaaaatgaaaatggcttgaatttccaggtcttggaaagtcctgacttaaattcatggatgcttaatttatctgtcacatgatctattaatggctatcatatagtatttttggtgaagattaaataaaataggacgtgaggaccagcacaatgtctgacatatagtgggctctcaataaatcacttctgttatttttcagaaagaaataattttttaaagctttatcgttggtcctctgattagccagcatacccccaaagttcaggaaatatatggaaagtgaaaattttataacttctggaaacctcctccatgtccaggaccttcctctgggtaaaacagaggaagatttgttttcatgaacctttctttctctttaacatttagaggtcgtgggcagagaagccttagaagacagaaatttaattcaaagactaaatgcataggaatggaatattgtagtaggtgatatattgctaaaaaacctaactttaaaaagtaattgccaacttaaaaagaagtcaggaaaagctgaggaatggttactactgtcttttctatcacagggcaccccccccccctcattttatacatgtattttcttgtaaaagttaatcaacacaaatgtaaaaactaaaataagtcaaggctctaagaagcacagataggaacatttcaaacaaagtgtacctgactagtaggcacccagccagctggcctttcctacaaaggaattttttaggagtattgtgtagtgctgtctgcaatgaacaagatagcatatcataagggcgtatcaggcatttggcaaaacttgtgctggggcccaactatgctggatacagaattctctctgttatccaggtctttatttcccacttgcaggaccatctgcagccaactccctatatcccctgaagccttcatccttcctctgaccatacatggcgcccctttggccttttgtcattttcaattattgtgaacccaggaaggtggaaactaactttaatatctgctgtaagaaaacataacaagaaatataaatctattaatttcaaaaaatcagtgattaaagccaatttattttccttggctgacattttccttcaaggatttctctgttgctcctgcctatagaagaattttagtttcccttcaaacattctactggtgccaagttaagaagttacctgaaagagaatgcataaaaatcaagttgaaatgtctcagctttgttcctttttaaaagatgaagacatagtgcattacttaggtaacactgcttctctgattcagtgggacagcttgatgagaagatatatgatactttgtacataaccgttgttttctttttgtcatcaataagttgaatcttgacttcattagagcctatccaaatgcatcattgcaacggatcatctccccacattactgtatccattatgtgtagagcaagttcatccaatttccccaacagtttatgagagaaaagaacaaattaaaaaggcctactctcttacatatcaggatgatttatgccagtgtgtcagcacacgtatttatattttctctggcccttctatttgcttaatatatgaaggaggaaagttaatattcttctgaaaaactctgttctggtctctactgatttgaacataaagttcaaaaggagatgatatcttataaagactctaagcttactgcattaaattaacaatactaatctctgtgtttcacatggtacttatgcagagcagctttacagacattaaatgaaaaaaaaatgccaaagctgtcttttatatgaaaagcaagaatagaaccttctctacatgtcccttcaagtctttttaaaagatacgcttcagctagtggtggtgaataagggggaggaaagagagccacattgaatgggttcttctcctgcttacctttcttcaacttcagacctttctaaatcccactgacctggagggaataaacagagaagaaagaagcatagcaagaagtagaaggagaaatagacaaccattcaaaaatgttttaaaaaatcatcaattaccaatctcaggaactctgggaaggaaactagacaactataacattagaaaatccagttatactccccttccagacacaccccatggagaaacttgaagaggaaagagacgaagccaacttcagcctcaaacaattttgcccatgacatcagaagatggtaggacatgaaaggggaaaactgcaggaagatctcataattctatagaccttaggaaaattccggctcatctcacattagttttccaattctccttttcccatttgtctatggagataggatatttgagcagtcccaaccacctctattcttgatttcacatgtccgttaattcaaaaaccatgtactgaaaatctctcacatgctctgctaggattaataaagacatcacacacaaacaatgtcactgctaagcttattgggctcaaggtctcacaaggtatgtgagagaggatgttggagacagagccaggaatagaaagctataacagtgatatgatataagtatgcatcaggtgctgtgagattccactcaaacagtttgtccagacatgatatttttgtaataaaatttcaagtctatgatgattgcctagctgcacagataagtctttttccagaataaaagataagccaacaatgaccacttccttattccacaaattgttagtctccatagtaaggtatggaacaaagtctggaaggaaaatattatgaagaattgcgaataatgcttctacttacttatttttgggagaattaagctaaagcttaatgaattgtattgaatgccactgaatcacattggacattgatggaagaaaaggaagttctacggtgggacaggcggtgcagcaagctgcccatcattgtacagaggttcaccttcagtactctgcagcatcttctagtttgtgtgtaccttggttaacttgatagatagatcacactatttagcatagtatctcactccaatcaatgcctgtcaataatagactggataaagaaaatgtggtacatatatataccatggaatactatgcagccataaaaaggaatgagatcatgtcctttgcagggacacggatgaagctggaagccattatcctcagcaaacaaacacaggaacagaaaaccaaacaccgcatgttctcactcataagtgggagttgaacaatgagaacacatggacacagagaggggaacgtcacaccagggcctattgggcagttgggggtgaggagagggaacttagaggatgggtcaacaggttcagcaaaccaccatggcacaggtatacctatgtaacaaacctacacgttctgcacatatatcccggttttttttagaagaaaaaaaaactgctgtattaaggcatagataagagggaaactgcatgtcatcatttactaagcacaaggtatgatgtgcttcttacatttttatgaagatatttatgtgaaaactttttcaatcattaaaagcgggtataaaactgaaattagaactaagttctgaattgacatgtatcaagattttcaaaaataattaagtacatataatcaagctgccctcactaaaattattacaaatattctattattatatacaagaagataacaatatgcaatatatacaattctaacatgttaatgagagctaaaactttctttgataatccacaaaagtattcaaatatttaattttttatcaaccttaacattttatatttcagtttctctatgttttggacacaatattttagcagagtaatacaatttacttataatttataaataaataaacacagtgagaagtatatactctctatttatatctacatacagttgaaccttaaacaatttatatttgaactgcatgggcccacttgcggattgttttcaataaaagttataccaaatgcgcctgcctctcccgtctctccttctagttcctacagctctgccactttgcctaaaaatcagcaagaccacctgcctgcttctcctcctcctcagcctactcaatgtaaagacaatcaagaggaatacttttatgataatccactttcacttaatgcatagtagacattttctctttcttatgattttccctgcctccctccctccctcccttccttccttccttccaagacagggtcacctaggctggagtgcattgttgcaaacatagcttgctgcagcctcgacctcccgagctcaggtgatcctccttcccagcctcctgtgtagctgggaccacaggtgcgtgccaacgtagagacagagtctcactttgttgcccaggctgttttcaaattcctgggcccaaacaatcctctggccttggcctcccaaagtgctaggattacaggcatgagacaccatgcccagccataattttcttaataacattttcttttctttaactaatttactgtaagaatacaacatacaatacatgtaacatataaaatacatgttaatcaactgaatatattatcagtaagccttttggtcaacagcagacaaccagtagttaagtttgggggagtcaaaagttttatgtggatttttgactgtgctgagatgggcactcctaaacccacattgtttaggagtcaactgtcttttttaaatttatagagcagataatgcaaagtatgatgacccctatcattaaagaagaaactgaggcacaaagatgcccactctaataattacataccattttctttttactccattaccaattaccataatcttaccactatttgtttgctatgcacgagcttttcatgaacataaacaccaaggctgaaagcatttggggtgaaatatatgtcccctcctctgtttgatattactgaaaaagaatctatttgggagaagatggaaattttcaaagtaaaatgggtgaactgttagcaatgataaaaattatacctataccttgggagacggaaagattttcatgacaaccttattttaaataattcttaagtttacattttctaatcttccataagcatatttatctattcaggaatatttgttagttttttatataaaatactcataaatgatagaaaaattaattatcttcgcttaagatttgctaccaaattgaaaaaggcacatatctgaaacgggatgagaaagcaacacaacaaacatgtttcctaatgatgaaatacaacgttgctattaaacttagagaataaaaacaatcgcagccataaaaaatgatgagttcatggcctttgtagggacatggatgaaattggaaatcatcattctcagtaaactatcgcaagaacaaaaaaccaaacactgcatatcctcactcataggtgggaattgaacaatgagatcacatggacacaggaaggggaatatcacactctggggactgtggtggggtcgggggaggggggagggatagcattgggagatatacctaatgctagatgacgagttagtgagtgcagcgcaccagcatggcacatgtatacatatgtaactaacctgcacaatgtgcacatgtaccctaaaacttaaagtataataaaaaaaaaatcgatcatattgaagttcagttttgtactttaacaccatctggtaaaattacagacagaatctaaaaaatatatgagtaaaccttttcttttgagatggagtcttgctctgtcgcccaggctggagtgcagtggcgcgatcttggctcactgcaagctccgcctcccgggttcaggccattctcctgcctcagcctcccgagtagctgggactacaggtgcctgcaaccacgcccggcttatttttttgtatttttagtagagacggggtttcactgtgttagccaggacggtctcgatctcctgacctcgtgatccgcccgcctcggcctcccaaagtgctgggattacaggtgtgagccaccgcgccgggctgagtaaacttttttttttttttaaattaataacttgttatgttttccactggtttaatcattctctttcttttaataaaattgaagtaaaaatgacttagtgtcgttttgtttctgctgtgtttctacaggtcatattcagagttgactgagcaccataagtgttcagccgactttgattttatttttatcgcatgcctcataaaactgatttagaaacctaaaaatgtgtcactaaaatattaaattgtgaacagtcagagcttattgagtttccaaaatctaacaagaatggctggctatgaaggcaaacaaacattcttcaaatgtagccagccacattttaaaaactattggagggatcttgaagattcagaagtgtatgattgataccatgccaaattttcagaaccagtagtctgtttttggaagacttctcctgcatggatgcctagtaatattcccatcataaagtggtttagctccattttaaaattataggggaggcctagtacatttggagaaaatttccatccattggcatttttacatttaatttccacacaggcatctttcttacattatctctgcttcacagaatcttcatcacatttcaactgtcatcagaatccagtttttctcttggctatatacttcatcattttcctcttgctgttaatgggttgatatgattgattgatggagcccctattctgagaacatgttactcagactcaggggtattaggatgctttgagctgtatgtcacagtagcacccgaaacctatgctgaagtgcccacgttggaggaaaactaaatcctaacggcttgcaagaataaatgctcattttaaatgaccagtgattccaaggaaaaaagttagatacccaaaaaattgaattcctccccagcaatgccccttcacttaaaggtctgggttcaagcaaacgcatcccactagaacccagtcctgaactttgaagtaaatgaacaaatgctcctggatgtatgaaggccccagcagtaaagctgagcacttcatagactctctcttagagcctgattgatgcttacttaacttaccaagaagggattttatgctaagatagatcatatttaagatactggttctgacgtggacacaaggaggggaacatcacacaccggggcctgtcgggaggtggagagctaggcgaggaatagcattaaaagaaacaactaatgtagatgatgggttgatgggtgcagcaaaccaccatagcacgtgtatacttatgtaacaaacctgcacattctgcacatgcaccccagaacttaaaatataataatttaaaacaaaacaaaacaaaaagatactggttctgtaacacatctgctgtgagaccatgggaaaatttcctgacttctgtcacacatctgctgtgagaccatgggaaaatttcctgacttctgtcaattttgttttccttttctgtgatgggataaacacacctattcctagaattgttacaggctggatctgatataataaccttctgatagtaatttactgatcacttgaaacaaaggttcagtgtatattaaatatgtgtttttacatatttttcattggccaagcatatttactggtaagcatgtttgttttcttctgtctagttcagataccatgaaagtatgataagattccttcaggaaggctcaggtgacgattgggataaccacatgttccaggtgtcctttgtgtaacaaattaccctcaaagttggcatattaaaacagcaaacattgatctcacagttcttgtgggtcaggactttgcgagtggcttagctgggtgcttctggcccagcattgctcatgagtttgtagtcaaggtataggctagagccacagtcatctgaaggtctgtcaggcctgggagatctgctgccatcatggctcatgcacaagactgttggcgggaggcctcactttcctgccatgcaggtttctccagagggagacagtgacatggctcctggcttatccagagttaatgatccaatagaaaaagagagagagaaaaagcaaccagaataaatactgcagcacttttttaaccccaaccttagaaatggcatagcatcatgattgccatagcctggtgtgatatgggaggagagtataggaaagggtgaataccaggaggtggggatacttgtaagcaactagcatttatataacatctctcaagttataaagtgcttttcacaaataaaacaactctaatgaagcaagaaaccagacagtcgaaattacccgcctacggccacagttatcaacagtatatactcaaaatgactcaaaagtgttattttccattacattctttatatcttcttggttctcttagttgatcaggatatactgtcttctattttgacactaagtagcttcatcttgattaagttctaatagttaaggtattaattttcatttaaaataaaatacagtgcttaattatgatggcagaaagttaatttaaataaattataacaataagaataaaatattttattttagaatggcatatttaaaaaataaaccctccactaacataatattgggctttattccaaatcccactttctagaaatttaatttacacttttctgaaaataaatataaaaaccagtggaaatgaggtgttacctgattttctatctgtaaagatgcaattataactttgaatcaactatactaccgtactatacagacttgaactagctagtggtggtgggtaatgaactatgctcctgtgttattccaagtaaacagccaactttaagcaatttttttaaaaaacagctgatttcaggataagtattaaacaacagtaccttacttcatcacttccatatgactgacttgtagtcagcgttactgaagaactaaagcttaattgtcagttaattgacacattattgtacatgtttctatatgtgatttaaaaaatcctaactcattttagatgcaaagaaaccagcacatagtctcatgccttgcagggagtgtttgaaaacaaaaatgaagataaacaatgtcttatcagaaaactcaatcttctaaatgcgttagctttaaaaatgttaaaaacagatttagagaggagaatattaatgacttgtcagcagagttaaagtgatacttatagctctttgctatatgtattgaatttgtgtctagtctaatttttttcttagagtaataaccagaaactgagctctcatgaacactgaacatggaagatcacagatcaggcaagattgtggtgtgtgtatgtgtgcacacacacccatgtacatttctaccttatatacaggatcattggtgtgggctttctctacgtctaatccaaataagctttttgcagggttaaactgatctgaatacttctttgtgaaagtaactttaaagaggtaatagtgtatggcgattatttgggcaatttagcccataatggctacaagtgggttatgttccttaattgctttgaatattacatcttgaagacagcagtgttttcacttttacaagttatcttagaaagtctgagatgcagtatacttagctcttcccaactgtaacctctctcattgtgcctttgagaaatgaagctcagattgagtgtccttacccaacaaatcaagaagtagaacttgttcccttgttcttattttgggaattttaatcctatatcataccactttcatctccagatacaacagccttggcagtatctagaggagtgtttccatacctcaatcatctgtggatcccattcatggttgaacagtacctgtattttacctagtattcctgtgtgagttttgccacacctgagtaacctttgggtcagtattttaaaaataaattagttttagtgaaataaatttattttaaatcaaatatctaattcttataaaattactgtttttcataaatggaagatgcccataaaaatctcctgtaaacaaaatctgggtttttgtctgcactcctatgcttattgcagcactacttacaatagctaagatttggaagcaacctaattgtccatcaacagatgaatggatgaagaaaatgtggtacacatacacagtggagtactatctagccattgaaaagaatgagatccagtcatttgtaacatcaataatgaaacagagatcattatgttaagtgaaataaacaaggcagagaaagacaaatattgcatattctcatttatttgtgggatctacaaatcaaatcaattgaactcatggatatagagagtagaatgtcggttaccagaggctggaagggagaagttgtgggggaggtgaggatgattaatgggtgcaaaaaataattagaaagaatgaataagacctactatttgatagcacaatagagtgattatagtcaacaataacttaatcatatatttttaaataatttaaagaatgtagctggattgtttgtaactcaaaggataaatgcttgaggggatggacaccccattctccatgatgtgcttatttcacattgcatgcctgtatcaaaatatcttatgtatcttataaatgtatacacttactatgtactcaccaatttttttattaaaagaaaagaaacaccatcaaaaaataatctgggcattttctaaaaatttcaatttaccaccttgccttgctgaaggttgagtttcatatgttttctcttatgaaaagtagagagtcacatgttttagggtgttgatacggacatatgtgtagtaacttgaggatgtccattgaggccatcaaaagcctgaaagaaaacatgaaagggactgcttccatattacatgatccaactacttttcaatgccaagtttcagtgtcatgtaaaatcagcttacttctaccaatatatgtatcatatacctggaggacttgtgatctagtctctagcagaaagagaatgggattttagcccaagaacagggtcctagcttgagcacgaccactaagctgttcagtaaatctggtctgacaacaattatatactgagaaaaccatatggagcataaagaaacgcaataaacttggtctccttaggtctcaggtttctctgaaaaatgatgggactagggtggagcgtcactgtgtccctttctagagtatgactgccttcaccagctgtttttattatcaacatttttgaaacttttacattttacttcccacagtcagagaacttctaaagccccaaaggactgccacctcacgtttaacaaagataaattagaaaatatgaaatgaatgctatcatcttcctaacatgataacctcaatataaacttaagagtgacatttccaaagtcaaatcataatctggataagttgtcctcaagtcttgtcaaaagacgactcttcccttggaaatcctagtgaaggtacccaattgcctctccattcttgttaaagaatgattatttttagatgaacaggagatcctactttcctcccattgcagcagagatatttcacactttttcaactagtccaaattcaaaatggttattccttaaagattctgtcaccagaaatatactcattcaaggaactttgtactctgtcatatgtgaataaatcagcttcatgttccaggtctattttatgctatgtaacttttttgtagacaacattaatgagattttagtctatcctgttattcctatattggagtgttttgtgttttgacttacttatcatagcttgtatttacaaagatgggactcagtaaagttggaaaatatatgttatgaagcaaatttatataactggacataacccatgaaatactgagtatgtctttaaatatatcagataaaattacataattaatactgcaatcacattttatgaaataaaggttttttaaaggaaagagcaaaaatatctctaagagttataactgagattgtctttttcatccatcaatcttctaaagtatatgttccagaaaaaaaaaaaaaacatggtgcactaaatcttagcaaagataatggatttctacagaagtaccttaagatcagagatatagattatgaaagcagtccattaaaaaaacagaaatgccaagttagacattttggcttttacaaataaatgtgaattacataagttaaaatccagattctgagtccctcagaccacttagggattactgacagtcttcttttgagttcttattttcaatattacacatccaaaggcttaacttgtaaaaggcatctggcctgattcacttgaagaattctattttaattcaaagggtatataattagaatactagtattctagcacttcaagatatttttaaagttgtttgaaaactgctatattatcacagaaggttcctcactggcacagaaaatggaaaagttgctcaatgtgttcaggatgctcttgaagctacctctttattgctttcctctcttcatttccaggccatcagtacctcttgaatctaccatcactgccagttccctgcagccatctgctgccaatagggtttcctaaagcattgctgcaatggtggagcctctccactcaaaggcctgtagggcatcctgttccactggtatgcatgccaatgccatgacccctccctgatccatatttccaatcatttctttcactctgccatatcagcaatgctttctaactcccactgcagcctccactgctaccaccctagtcacagccaccactcttcccactgttggtattcttttgttttttgagatggagtctcactctgtcacccaggctggagtgcagcggcacgatgttggctcactgcaacctcctcctcctgagttcaagtgattcttgtgtctcagcttcccaagaagctgggactacagccatgagtcaccacacctggctaattattttgtatttttagtagagacggggtttcgccatgttgaccagcctggtcttgaactcctgacctcaggtgatctgcctgcctcggcgtcccaaagtgctgggactacaggcgtgagccactgcgcctggccccactgtttctattcttgaccctccatagtatgggccagagaacttactctgtgaagggtcagatggtaagtattgcaggctttgtgggccagacagtttctgttacaactactcaacactaccattataatgcaaaagaagccataggcaatatatacatgaatgagcatggccatgtttcatgcaaactttatcattagacattacatttcagttttatataatttccaagtgtcataaaatcttcttttgattttttttttttttttttggtttccatcatttaacaatgcagaggcaattcttagttaatggaccatgcaaaaaaacagccaatagactggatatagcccacagccagtagtttgctgacctctgctctacaacttaattgtaactgctgtgtttagaatgctgcagtggttccccattccactcacgacatgtgcttaggtcctcaccatggcctaaaaggcctcatataatctgtttccctttgcctttcttctgtcttctccatttactccctggttttcctctgtttcagcaaactgacatgctttctgcttcttgaacacatggaacacagcctgccttgtgacttctgcactggctggcctgtctgcctgaaatttgtgttcccagatatttctatgtttctcttgcttgcttcaagattttgaccaaatgccattctctgatagtctatcttgactactctatttaaatttcaaccacactgttatggacggaattgtgcctccccatcccaaacttgtttgttgaagtcctaactcccagtacctcggaacgtgactgtacttagagataagatctttaaaggagtgattcagttaaaatgaggcctctaggatgggccctaatccaatctgaccaatttccttataagaagagaaaatttaggcacacagggagataccaggagcacacaagcacacagcatagatggcatgaagacatagtgacaaggtggccatctgcaagccaaggagaaaggactcagaaaaaaatccaacctgctcataccctgactttggacttctagcctcaattgctgtgagaaaacaaatttctgttgtttaggctacgtagtctgtgatattttatagtgatggccccgttaaacaaatgcacactctaacctccacagtcttcccaaaccgacttatcctattgtatatttacccagagtatttatcatctactgacatgcattttaatttactggcttagtatgtgtattatctgactccccactacatgaggctaagatcttttgtttatggatgtatccaaagtttgcagaagaggacctagcaaaggataggtacttaatgaatacctgttggataattgaatcctagcaatgcattcatctcttatatcccctgcctttgtttcttggctcttcctgaggtccaatccccaactccacacccatggccagtgaaacccacctcaaatattaacaatgctaagaatgtatctcttgccaccaacactctgtgctctttctctttggagtctagtaatacactatctgtttttctcttgtggtgcttaatacattcaagcctgtattgaattttctatatatacgcatatctcagagatattgcaggttccattatagaacacagcaataaagtgaatatcacattaaagtgagtcatacaaatttcttggcttcccagtgcacgtaaaagttttgtttacactgtactgtagtctatgaagtgtgttattgcattatgtctaaaaaatggacataccttaaattaaaatactctattgctaaaaaatgctaactatcatctgagccttcagtgagaagtaattttttgctcatggagggtcttgcctctatgctgacaaatgctgactgatcaggacggtggctgctgaagtttgaggtgtctagtgtaattcttaaataagacaacaatgaagtttgtcatattgattgactctttcatcaaggacttaactgaagcatctgatgctgtttgataacattttacccacaagataacttttttcaaaattaaagtcaatcctctcaaacactactgctgtttattgactaagtttatgtaacagtctaaattctttgttgtcattccagcattgttcacagcatcttcatgaggagtagactcctttcaagaaaccactttctttactcacccataagaagcaactcttcatccatttaagtttgttctttagatggcagcaattcagtcacatctccatgatccatttctaatcctcgttttcttgctatttccatcacatctccagcaacttcctccactgaaggcttgaacctctcaaagtcacccatgaatgttagaatgaacttctcccaaatgttgatgttttgacttcctgtcatgaatcatgaatgttcttaatggcatctagaatggtgaaacctttccagaaggttttcaatttacttttcccagatcatcagaggaatcactatctatgacagttatagccttatgaaaagtgcttcttcagtaataagacttggaagtcaaaattactgtttgatccatgggctgcagaatggatgttgtgttagcaggcatgaaaataacattaatctctttgtctatctccatcagagctcttgaatgactaggcgcattgtcaatgagcagtaacattttgaaagtaatcattttttctaagcagtaggtgtcaacactgggcttaaaatatacagtaaaccatgatataaacagacatgatgtcatccaggtttggttgttccattattgagcagagacagagtagatttagcataattattaagggccctgggatttttacaatgataaagaagcatttgctgcaacttaaagtcataagctgcattagtccctaaaaagagagtcagtctcccctttgaagctttggagccaggcattgaattcttctctctacttataaatgtcctagatggcatcttcttccaatataaatctttttctttatttttattttttgatacagggtcttactttgtcacccaggtggggtgcagtggcatgatcatagctccctgcagccttgatctccctagctcatgcaaccctcccacctcagcctcctaaggagctgggactacgtacagtctcgagtagctgggacaacgtgcgtgcaccaccatgccaggctaattttaattttttttttttttttaaagacaaggcctcactatgttgatcaggctggtctcaaattcctgggctcaagtattcctcctgccttggcctcccaaagtgttgggattacaggcatgagccaccgtgcccagccaggggcttcttcatctacactgaaaatttggttttcagaggaacaacatttatcaatgatcttagctggatcttctgaataagctgctgcggcttctacatcggcacttgctctttaaccttgcacttttgtggtatggatatggcttcttcatgaaccaacctctgctagcttcaaactttcttctgcagcttccctatttctctcagcattcatagaattgaagagagttagagcctgtattagaccattcttgcattgctgtaaagaaatacctgagactggataaattacaaagaaaaaaggtttcattggctcaccgttctgcaggctgtacaggaagcacagcagcatctgcttctggggaggcctcagaaagcttccactcatggcagaaggcaaagggagcagacacatgacagagcaaaagcagaagtaagagagagtgagggaggggaatgccacacttttttttttatttttatttatttattttttttgagacagagcctcactctttcacccaggctgaagtgtagtggtacggccttggctcatcacaacctctgcctcttgggttcaagtgattcacctacctcagcttactgagtgtctgggattataggcatgcactatcatgcccagctaattttttttgtaattttagtagagacagggtttcaccatgttagccaggctggtctcgaactcctgacctcaagtgattatgtccatgtcagccttccaaagcgctgagattacctgcgtgagccaccacgcccagccaatgccatacactttcaaatgaccagctattgcaaaaacccacacactattgtgagaacagtaccaaggggatggtgctaacccattcctgagaaatccaccccataatccaattttctcccacctccaacactggggattgtaactcgacataagatttgggcagggacacatatccaaactgtatcagagacttcctctggattaggctttggcttaagggggagttgtggcaggtttgatcttttacccggaccactaaaacattctttatatcagcaataaagctgtttcactttcttactattcatgtcttcactagaatagcaatattaatttcctactagaacttttcctttgctgtgacaacttaactaacagtttgacatgagatttcagctattttggctttggacatgccctcctcattaagcttgattatttctagcttttgatttaaaagtgagagatgtgtgactcttcctttcccttgaacacttagaggccattaaaaagttattaattgaactaattgtaatactgttgtatctcaggaaatagggaggcccaaggagaagaaaagacatggggaatagctggtcagtgtagcagtcagaacacacacaacatttattgattacgttcactgtctcatataggtatggttggtggcactccaaaacacttacgatagtaacctcaaagatcatcataaaagatataatgataatgaaaaactatgaaatattgcaacgatcataatgtgactcagaaacatgaagtgaacatgtgtttttggaagaatggcgctgatagtattgcaaaaggcagggttgccatgaaacttcaatttgtaaaaaatgcagtatctgagaagtgcaataaagcaaagaacaatacgatgaggcatgcctgtatgttttatattctccactaaatgtcaagctcctttatggtgcagctattgcctcatgcatcttaaaatcccttaccataccttctgaatgtgccacacatattaaagacacaacagaccttagctgaaattaggaaaattattacaataaaaacacttgttactgaacaattacacattgtgtcaggctctattttaagtcttcatgtcacttgcctttactaacaaaaatctcatgaaggtcggactatcattatctcaaatttattgataaggtcactgaacctaacataagtaacttgcccgagatcatacgactaatgattggtgaagccagatttttttttttttttttttttttttttttttttttttttgagacagagtctcactctgtcacccagggctggagtgcagtggcatggtctcagctcactgcaagctccacctcccgggttcacgccattctcctgcctcagcctcccaaatagctgggactacaggcgcccgccaccacgcctggctaattttttgtatcttttagtagagatgaggtggtgaagccagattttaagcacagacctattgttctacagatatcagatatcaggatctatagtatactgtcttgccagttaaaaaacaatgcttactttaaagaagatcatgtcgtttgtgggaacacagatgaagctggaggtcattatccttagcaaactaacgcaggaacagaaaaccaaatacctgtggtgcatacacattgtcccagttactcgagactgtacgtgttctcacttctaagtgggagctaaatgataagaattcatgaacacgaagaggggaacaacagatactggggcctgcttgagggaggagggtgggaggagggagaggagcagaaaaaataactattgggtactaggtttactatctggctgctgaaattccataaaacaaaccctagtgacactagtttacttatataacacatgtacctccaaacctaaaataaaagttaaaaaaaataaatctgtaaagcacataaaaaatgcttactttaaaataaaaatactgctatcatgttaaatgaaataaaaggaagcagcatgtacctgaattcttatgcgttttagaagctggaatggactgatttcacatttcccatgactacttttcttattctaaattctgagagggtagtctttgtgcattggtcaaattgatatacctactgaaattttaaaattcatatttcataataaaattcttctctacatcttatttcactggtaatacttgaagatttaaaacataaaataataaaatgtattaaatatggttgtctttcctaaaactaggactttaacatctacgcaaatctgttatgcttttataatatttcataaataatttaaagaatgagtaggttgttaatattggcttgtgaagtaactaatttctacatgttattgtagtttaaaaatttttttactatactttatatcctaggaaaaagccaagattaatagttaatcttatttttggtgaaaaaaacaaactttttaaaattattattatactttaagttctagggtacatgtgcacaacgtgcaggtttgttacatatgtatacatgtgccatgttggtgtgctgcacccattaactcgtcatttacattaggtatatctgctaatgctatccctcccctctcccccgaccccatgacaggccccagtgtgtgatgttccccaccctgtgtccactatgttctcactcataggtgggaattgaacaataaaaacaaacttaattacaaattttttgaaaattaaggagtttagactcaaaaagtgttagcaagaatacatattgcacatatttgtataatatacaagtcatctgacatttttgggtaggaaatatcttttggtaggagagtaataaagcataattaagtaaaaccctttaagtatattaatgtataattttatcatttatgaaggaagtctttgagtcatatgttctacctaattttgaacattttaaaatcaatagaaagtgaacacattttaacattttctaaggaatttaaaataattgcataatgttttacataatacactacaccgatttataagtatctgaaacaggacttagtgctgtttgaatgagtactgattccagccactgtccttacaaatgctggcttgtaaaagtactcagcagaaccttgaattgggatcactttatttttccaatgaggaaactgatatcatggggggaatataaacttgtccaaggtcacctgctaagacgtgatggtgcaaagataaaagttcaagtcattttctttgccaggtctaagtgtttctaccccaccaagccaccacctgaggcacttgtcacaatgtaaggttgtgagagcaatgtgcttgtggaatgggagagtaataatcagtacgtggaccaattagctgttatgaccttagtaaaatcacttgaataactcaggtccagttgtctcttccgaaaataaagaaaggagaccaaatgatttttaagatccattgagatgtaacgtgtctatgatccaagaatatattctgacacaaaaaattcgtttatatgagtgacatgataaacacaatgttgtctatattgttgccattgtgttaaggacttgtaccactttgagtgcaaacaagtttctcaaccttctaagttcagggattgtgcttttacttgaagataggctaggagggcatcattggaaggaacatttgcatgtatttgggaacatacccagcacttggctgtatagtttcccttgggggaattcagtagacacagcataaaactgatctttaaagttctaaaagctttttatagaactggcttcctagttctttaaagccttttgacttttgtttggctcagggaattacaagatgattaggaaattctttttgtatctcccatcataaaacaggctctatgtatcttaacatgttatagaacaggaatgtgactgatttggtaggcattaagtctcttatcctaatctggtggtcttgaaaaataaaaatcttcccattgtagaggtaataatattgagctcggaagatttactactttctccaggagaagaaaactgcagctagagaacagatcaacttaaagcctggtaatactttactcaaagcatggtaatatgtttttttgtgtgtgtaaaatctctaaaatgatagtacagccaaggcggtatctgtttccagtaattttaccgtatttgaagatgggaagaacctataaatttctaatattaatttattagtttatcttatagagatataactatgtattttttattttaaaaacattaaaattcaactattatacatatactatgttccccgtagaaaaatgagaaaatacaaatacattgacatttatacataaatcaaccataagatgtatgactttttaaataaatgagcaaatatacaggacctaccccatttaaaaatgtgtacagttagagagaattcacacttccaaagctctcaatcatctataaccattttttatgattggaagaagtaccaggtagagatagaacagaaccataacacagattagaatgagcagctgaagtagccaagatcagaagtgattaggtcaaatggtatttctagtatcccattactgggtatatacccaaatgactataaatcatgctgctataaagacacatgcacacgtatgtttattgcggcattattcacaatagcaaagacttggaaccaacccaaatgtccaacaatgatagactggattaagaaaatgtggcacatatacaccatggaatactatgcagccataaaaaatgatgagttcatgtcgtttgtagggacatggatgaaattggaaatcatcattctcagtaaactatcgcaagaacaaaaaaccaaacaccgcatattctcactcataggtgggaattgaacaatgagatcacatggacacaggaaggggaatatcacactctggggactgtggtggggtggggggaggggggagggatagcattgggagatatacctaatgctagatgacgcgttagtgggtgcagcgcaccagcatggcacatgtatacatatgtaactaacctgcacaatgtgcacatataccctaaaacttaaagtataaaaaaaaaaaaaaaagaagtgattaggaagtcacaattctaccaacctgggaaaagatacgcaaagaaataggcaggagatggtgtagctttgtccccttaaaagcactggtgttgttcaattttgtagcacttccaatgactatgtaatgaacattgactgtgcaccagtatggtctaggcactggattacgataataaacaacaaaaaacccataattattttaaaaagtttatattccacttttacagacatttgtaaatattctatgttattttaggtagtggtaatttttatggagaaaactacaatgcctcccagcttgtgtgggacagtttggatttgtgcctgttttcctgctgtgatgattaagattgcctctttttactctcaaaaatgtcctagttttggtgaccctctctgtaaaagaaatttcaaaacaatgataatatgaaaatatgtatgggaggggttcttttggactggatgatcaggaaatgtctcactaggtgatatctgagctgagaattaaagtaatcacacagctcttaagggtgaatttgaatttgagaggggaaaactgtgtagtcaaacaaagacgtagtttagattctgacaaacctgattttatacctcagccccagcacaccctaggtttggtactttgggcttggctccctgtgagatactcaatagtataccttaagtctaataatgtgattcagaaatgaacacattaaattacatgggcaaagaaacttatatttatttatgatatcctctcacaataccataaagaaataatctatattttaaagcaactactgtgcagtacacactgtgtttgggtacagctggttaattaagtattaccggttgagtatccctaatccaaaaatatgaaatccaaactgctccaaaatctgagcctttctgaatgctcaatggacactcaaagaaaatgctcagtggagcactttggatttcagattttcaaattaggaatgctgaaccagtatatattctgcaaatattccacaatccagaagagtccaaaaaccaaaacactgctgatccaagcatttcaatgatgagatactgaaccaggttttctgtcttttagaagatactgatctacctgagataaaacttgaacacctgaatctgttcaatatacagggttgactagtaattaaatgctgaacaatatgggacagacaacttgtactatcagagctcaaaaagaaaataaatcaatatacattacagaatgaagcagggttccaaggaaagaaaataggatctgaacaggtgtttaattgataaaatgcaatatttcctacctgaccactcaaaaagccatggaaatttgctccaggcagacaacaggaccctctgttgggcttggccagtggtttctgcagcaatcgggttgtctggaccatttagctttttagcaaaacttcctgttcctacaaataatcccactaatcctctctctccccagctgcttccttgcctttcctgcttggctcccctctcataagcctctttctttctaattttttcagaggaacatattttacagtcccgttgcttcacctaccttgcccattgtccttgcctaaaattgtccttgactgaaatagtaagagatagttttcctctgctttttgaaatcttagcatatgttggttggttgagttaactgcttcatatttatttgctgtactggcaggttgacagggcaactgggaatcatgaagaaatagttcagcagaaccacgagactcagctcttaacaagcacttaataaatgttggttgaatgaataaatggctattgtagttattgaaaactaatacaattaaaggcaagtgagtttaaaaatcacagtcatttatataggtacctttctatttattcctaattaccaggaagcataataatgattaggtatttcaattatttttagtgaaaatttaatttgaataaaactaatagaacatcctatagataacagatcagtaatagcgacaaatttgttaaacgtgtgccagcaacagaaataattgtacaaagatccccattttacagatgcgatgacccagcttagaggggtcatctaattggtcttcccaattgtgaggttaggaattaaaagctggaattccaacacagctctatgctgtgctgttgcctctcagaaagatggctgggggttgagcagagagaatagctctcctggaacacattttcagaatataaactttttcagttatgatgtaatatatttatattattgtcattaagactatgatgaaaagacattagaggaagcaaaacaaagcctgatagttcagatatgagataagtaaagaagggtgtcaaatgacgaaatgctttttatgatgatatagaacgatgaaatgctcccttatgccaaaccttggcacagtacttctatgcccaccctggccactgattcagtcctactctcatatttgttcttcctgaagttggaaaataatgattcactggccatcctcagacattattacatgttgatctactgcagggttttattcaccctcctttaaaaacataaagtgaacattagccccaaataaagaacaccttgagacatcctgatgtcactgctatatctctattaggaaggagaaataaataacgttaagcatagagccatattttgtagggacttgctaaaaactgatttgttggtaaaactagtttatattgcaaatatacatatatatgtatatatatacatatattatatatatattttatattatatatatatatatacacacacacatacgtaaatatacacatcaacgatgatctctgtcatggtcagttggacttttcttccacagttaagggaagctcctcagatcttaccttcccaagcccacaaatgtatcccaatactggaaaaacagtgttggaaagaaaataaacttcatccaagaaaagatgttgatatggtttggatgttttgtcccctccaaatctcatgttgaaatgtgatcccagtgttggaggtggtggctagtgggagttgtttggatcatggggctagatccctcatgaatggcttggtgccctccccagtgtaatgagttactgacagatctgattgttaaaaagaatctgggacctcctctcctcttgcttcctgtcttgccatgtgacacatctgctcgcctttcactttccaccatgattgtaagcttcctgaggcctcaccagaagccaagaagatactggtgcaatacttgtacagcctgcagaaccgtatgtcaagtaaatattttttctttataaattacccagcctcaggtattcctttacagcaatgcaaaacagagtaacacagccatcaatgtgcctaacaaacacaaaccatagccgtatctcactgagttgtaataacatcttcccataataacaaacatcacattattttcaaatatcatttaatttagctgattataatgacattctctcagaatacagagtcagtttgtttgaatgtataggtttactttacttctggaatgtaaaaaaacatacagagaaatatttgagagaagttttactgtcaaagtaaaagataaacaatgatagcaaacgatgtggtagaatgataggaacctctgcatgacccacagatatgattagcttgctcatgccactttcaatatcttttgaggggaagcaacatgaccactgtgagtaattttaaataaaaaagcccagtcagtggtaataccagtggtgagtgaatataaaataatcaatactgctatgaacatatttctcctgcttagagtagctttcccgcaggttcctaggatggggtcagacaatggaagcagtagcagaaactctgaaagtaggaggaaaatgagaccagcatttttttcttccctgagctttcttcctaacaggcctctgtgggtaggctatattcctgtactcaaggccaccactctgtctggaagctttctagacacaggtttcctctccaggctctggaaatggttcctatctcttgcctcttcaatagtttactgttaccagctggagcatacacattaccccttattgctccaatatagagtcactttatcaaattcttttctggagtgtaagatctcattcctgccagaaacagaactgatacagatcacaatcgatgtataatatcctcggtagtctttgtcttgtattgtgaaacttaaacgtttctttaagtacttaaacgaggcactgatgtgtaagtgctgaagtttctggtaagaaagctctgattacctttagcaagaggggcaaacgcagctctttttttttttttttttttttttcttgagacagagtctcaccctgttgcccaggctggagtgcaatggcgccatcttggccactgcaacctccgcttccagaattcaagtgattctcctgcttcagcctcctgagtagctgggactacaggcacccgccaccatgcgcagctaacttcttgtatctttagtagagatggggtttcaccacattggtcaggctagcctcaaactcctgacctggtgatccacccacctcagcctcccaaagtgccgggattacaggcgtgatccaccgcaccaggccaaatgcaactctttctatgaacatgagctcctccctttagacctcgtgaaacatgttgattaatttagccaaccagtcaacaagtgagttttaagagtttaccacgtctaagactgtgagatcagaccacttactactttaaagttatgacaatgataaaaacagtcttctttgggaaagaggctttaaccctgcaagcttacctactatgctaattataggaaaaagaacataatttgcaatgtaataaaacattaacatgcaaatttctttctgaaattaaagaaggcaaccagtaatctgtatatataagtgttttgtttgtttaaatcagagatcatgtaatcagatttggcagaaatggcagattataagaagattaagcaagaccatgaattccccacaaacgtccctttaatcctgattataaagttaaacaggacaaaataattatcctgataaagttgaaaatgtaaactctgttgggaaaagtaacacagtgccataaattcattggcagtcaagtgtaaacatcatttttctttgctttcttttagcttcagaataggtttcaatggaagaaagagcaaaagaaaacagtgtaacatggtggtattttatatgcatttgaataataaaaattttacatgatgctttaagaaatataatcttgttttatcagcaaaatttgaaagaatagattaaaaagttgaaaaaaaataaatcagcaatagcataatttcagagcatgcgggccaagagaatataaactgtgtatttgactgccacatgtcagggccacttgaactgggaaatagaaaatcctgtcatttttttttttttttttttttttgccaagattcaacttgaattttgctagtgtttatttatgtgaggtctttaggggtacttcctttgtgtgagatgtgtctgccctatgtgtaaatgtggctgggctgggggatgagagagtacataggagagagaggttggaaatatgattctgtgttctatcatctccagggagaaagaagagaacagaaaatggaagggcacacagccagaaacaaactttgttcaagtctccgattttgcttaggatcacctcttccagacagagtggtggccttgagtacaggaatatagcctacccacagaggcctgttaggaagaaagctcagggaagaaaaaaatgctggtctcattttcctcctactttcagagtttctgcttctcttcagacttcaaaaatgtagtataaaaaatatttaaaatatttaaggctgggcacggtggctcatgcctataatcccagcactttgggaggctgaggtgggtggatcacttgaggtcaggagttcaagaccagcctggccaacatggcgaaacctcgtctctagtaaaaatacaaaaattagcagagcttggtggagagcgcctgtaatcccagctactcgggaggctgaggcagagagaattgattaaaacccaggaggtggaggttgcagtgagctgagatcgcaccactgcactccagcctgggtgatagagcaagactccgtctcaaaaataaataaataaataaataagtctttatatgactagcctgtggtggcttgacccacaataacttcagtgatgtcaattttaaggctggaaaccactcaaagaaaacttgtgaaacaaatggacaaatgtgcatcatctctccctctcatccgttaatctaaagctctctacttgatggaatgatgaattcttacctcctgcttttaataatataatttcacaaaatttgaaatactttaacacactagttaaacaattcagtgtttcacagaatttttgggtttaaattgcttttgcttcccttaggtggagaattgaacttggacatgcctataactttcagacctgaagcctgaaacagagctccaggcaatattcacctcacacgtatatttggggaattcttgataatggaaaaatgtgttcaggtcttgatttttcaagaaaacaatgtacagaatattgaaaaatgtcaaaacaaccttcaaataagtaccctaaaacatgacaatattaaatttcacacataaagaagaaacagttcaaaacatgatatctgcaataacattcatccttctcaatggggcagcattcatatgatagggtgttgtatgggttcctatcatacacaaatagaagtgtcgtattcttggagcaatcctaagacctatctccatttatttaggtgtacaagaatatattgggtagcatgagccccatctagaattgaatatgatatggtacatcaagaggcagatctcaagctgagaagaaaataggaaaattgatcctacagtgaactgaggccattaacttgtaatatttgcatatggatttctgtgatttgctatacataacaaataaacttttaaaaagcatatgtttttatgataaatacagacattatatatgtttgtaaaatacactctttgagaagtgatctgccatgataaaaaatatgtaggaagtttcagggaaaatagatgtatcttattttagctggacaaatctttacttttgaatctgtactctctaaaaaaattattttagaaatcaaattaaatttttaatttgtaagcaatcctagacactgccacaacttacatgaaaagctctcacaaaaggaaattgcttttctgtaacttgtgataacactaataagacaaattgaaggaaagtttgtatccacaaaaatttctttgcacttccaatattctatgtttgtataaatggcccattgtggtatcaaatgagaagcagctgccaaaaataaaattatatattttggaattaacttgttttcaaatgtaaaacaaaatcaccgtttcctcagataacacgattgaccaaaaaaaaaaaaaaaataaaaataaataaataaataaagggctttttggtaaaaagaaaaaaaatcacccaagacatgttcgtgttgttttaaatttttgataactacaaagatacatgctgattgctcaggatacaattagcagctgcctgcatatccaaccttaaaggaaattttttaagctagttcaactctgtttcctacttcttcattaattactagctaagggacttgaaagtgtcctaatgaattttacattagactctgtaatatgaatggtgtatattatcacagcatctagtaaatgcataaattggcttttccaagtcgcattttgagtagttgtaaagattctggctggatatcacaaaatttagtattagagactgagccgaaaagaatttttacaagaaacaggttgctgcaatcacatttctcaggtcataaatctatgttactactttatgataatctgtcggtccttgttctcaaagttcaaagatgctgtgcttcttctttttttttttcctcctgtggttcaaaaagaagaaagcaatcccacttacagtgatttccaaatacgcattgaataaagcttaaaatactactgctataccagctttccataatttccatattataaagtaccatccagtgataaagtaccaaccacagtgttttggatttaatacttatggtttacagtttcccaaccacttaccattttcgtaaaattctttgaaatcaaaagtttaagaaaactattcaacaaacagaatgagctagacaggcagaaaactgtacctaaatccagtcagaaacagacagaaccttaggattgccctatcagagaggaaaggacagacaaccatggaaacctcatggaaagctttcttttataaaatatttctctaatttcatagcaaggtaaaagatcacctcttgctcattttcaaatgtgacatgataccataaatggcacatcatccttacttgaatgtttaaagctaatatgcaggtaatgtcaaagtcatagtgatgggactaaacatttgtaatctaaaggtgaagactgcgtgagaaacaccacagagctccgagttggcaaaagtcagatacagactctcaatgattattccttaaagaatatccaaagtcaccacaattcacattacctaaagattaaaatgcggatattaacaggaaattaacattaggatgttaacaatcctcttaatatctattaatatttgatgatgctctctaaaatcatttgattgtcagttactctcttaaaatggttttcccttattacactaacataattgtatatgcagtttagttaattatcgccaagactttactttcttaggtaaaatgttgctcaaattcatctctcagctttatatcagcacaagatcacctcttgctcattgtcaaatgtgacacgatatcataaatggcacatcatccttacatcatccttacttacagtgtgtgagtttctttactctttttttctctttatttagattaaagaaaacaaatataggtcagtatttgaaaaataaagctcacaacagttctttatgaccagaatcaaagtgtgtgtcctgttaaccaagatttgtctctcagaagtttgatgatctgttaaaaaatatatatattatcagtgtcaagtattttagtcccacctgtcactaatttaatgacggcattgcctaggaatttcatgagcaacaaaactgttgatttagcctcataattttggaacatattaaaaatattttcttgctatcaacacttagatttaaatagaatttctatttcaatcatgaaaatttttaaacattgaaatccactgcaatgaaacaaatatgaaacctcacatggacattttactcttcagctgttttcatattttgctcacattttgcaaggaacccagagatccaaaagaaatatccttaactctttcccggccaagccctatgatcaaacacatgggaaataatctatggattacaataatcaaacagttctagagaatttctaaatatctgcaggaagaaaatctgtgtgcttttcaagtaaactgcagcaatcaggaaagaagagaaaaaccccttgcacaatcatgtatttaaaaaaaaaatctttctactctgcagatactgtttcctgaaatttaccaagaacactgccttgaagagataaaaaaaatacatccatagaagtcagttctacccccaaaagagctgcactgcacacatttttagaaacataaatctcagcaaatacagttgcattttattgacaacattaaaaataatcacaacaaagaaatagcctttcctattccatttcaacttcattaccatgctctactagcctctactaaaaaaaaaaaaaaaaaaaaaaaaagtcattacctgtatgaagagaacctgttaatagtctgagaaggtactgggcaaatttcagtatttcacgtttacaccgctttctacagccactcatcttaagcaacaaggtattcctctgaggagagccagaagtctttgccaataataataataataataataaaaagagagtctctgaggagaaacttctgtctcagtttatgcacaggctgccttacaactcctgtggaattagctgttagcgcctcaatcagaaattcctttaaaatgctagagaagccagatacagctacaacagtaacagggaggtgagaaaacacggcttctcagtgtggtgaccaagttcttctgtggcaacagacaggctgccggttcacacttgtagtaacccagctctggttcggctcggcatcccctctccagaagcagttgcaacctcacagaccattcagagggaggcggggcctgcgatgccagctcatcagtgaatcagcatgtaagcaggtgagaagacagatgacaggtcactgggtctgaaacccttccgataccaataaagggaacctgcgagtgcactccagcctgctggggaggaatctcagggcccgaggctgtacaaaatgaatgattcccaaaaaaaggaggtggggagagggaagcatgctgctcaaggtcagacatcagacaactcccttgacacagtgttaatcagattcaggaaggctacatgggggaaaggctcatttgagaagctgaccctgattctaaacagacttgacgatttaccaccaaatggggacaatgctattttgtcagggataaatgtattcttcttcatgggcttagagggagaaaacaagctgtttcttaaaactggctacattttctgcacagcgcgggctcaggtatttggaaattaggatacataattgtctcctttaaaacacagtagcctagaaaccagaaatcttaagccctttacattgcctccaggcaacagagctccaaaactaatttactgcgttgtcctaagagaaagaagtgcctcagtttcttcatatttcaaaaaggcaaacacaaccatctccctaccaatcaacttttttaaagttaatagccagaacaattgcaaggatttgcaattttcacaaagtactttccttttaagacattgggatagaggcagttgctgtgaaagccagaaaactacaggcttgccttctctgaaaaagtggttttcctgaattcttaagtgccttaggcagttttcgggatttgtctacactcttaatttatactcctagagtttgtttatttttgtttattctgaataaatataaatattatatctgtgagatttagcacagatggggccatattttaaatacctagacaggccttttggcttctttttctgacagttgcaataattctagttgaaactgataattcccaacagtactacataagaaattatgttcttctacactaaagaaagaactcctggactcatagactgaaacacattgaatggaaactcattctcttctagaactcttccccattcccaccagtctcagggttctaaccattctaaccatttaaatggaataacaaagcatgcattctaggaattttcagaactttaattgaaattatttaagatataaatagactcatacacaaaaatcagcaacgtgctttctgaagttctttctcctacacatttaccatgagtgatggcatccctaagtttgaaataggcagaagaaatacacaattgtagttcaacagttggtttaattagttgaacaccccatttccttatctacaaaagtgggaatagaatgcatattttatttacttgttggagagtaaaataagatagggaatggacaaccttaagcacagcacttttattcatagatgtagcaattctatactgaacacctattatgttccagacatggttctatgtgctgggaaaacagtggtaactgagaaaggcaaagcctctgttctcatgcagcttacacctaaacaaagaaaacatcaggttatcaaataataaataagaacatatcccatatgagtaagtgctgttgaaccaggagagaacattaaaaccagctggcagaatagaaagtgagtaggttgagaggtcaggaaagaggtctctaagaaaagaagttaagtaggagtttaaattacaagaaggaactgaccgtgagatgtttagggtaaagggcaccttgggtggaggaaacagcttatgcaaatacgccaagctgcgaatgagcttggcatccttaaggaacagagagaagggtgtggctgctgaaacatgctgagccaggagagacttctgggagacattttcatggataaagtccggggctacagtatgtgaagccttatagctggggtaagggatttagatttcagtctctttgccagaaagccactctagggaataggggacttgtgtgatctgcctgctatgaaaaggatgaactgccagggagcaagagtggaagaaggaacacatgtgagggggcatcacagtggcccaggtgagaaacaatggtggcatggcctggagtggaaatacaggtagtcagtttctggatataattgaaaacagaatcagtacaatttggtacactgaatagggacatgagggaaagaaaagaattaagaatgaattagtttgggacatgaataactgaatgggtaaatttaatgagttgatgacatagaaatactatgggattgctggatcgtatgataattgagttttttgagatactccatactgtattctaaaatagctgtactattataatttacattcccaacaacagtatatgcaggttcccttttctctgcacccttaggatacttgttatcttttgtcttttggctaatagccattctaacagatatgcagtgatagatcattgtgattttaatttgcatttacctgatgatcagggatgttgaatgttttttcaggaacttgcgggtcatttgtatgtcttcttttgataaacgcctgttcaggtcctttgcccactttttaaaatgcattatttgttttcttgctattgagctatttgagtttcttacatattttggatattaccccttatcagatgtatggtttgcaaatattttctcccaattgtgggttatcttttcactgtgtttttgttgtttttttttgtttgttttttgctgtgcagaagctttttagtttgctgcaatttcatttctctatttttgttttattgtctgtgcttttggggtcctatatgataaatcattgtccataccaatgtcctgaagcttttctcctatatttcagtagtatcacagttccaggttttacatttaagtatttaatctattttgagttaatatttttgtatatgatgtgagataaaggtccagtttcattcttctacatatggttatccagttttcccaacactttttattgaagacactgtcctctccccatggtgtgttctgggcacctttgtcaaaactacttctggggatatatataaaaaattaaattagtatgtcaaaaagatatctgcatttccatgttcatttcatcatgattcacaatagccaagatacagaagcaacctaagtgtccatcaacaaatgaatgaataaaaaaatgtggtatatatacacattggaataatattcagccttatacaaattaggaaattctatcatttgtgataatatggaagaaactcaaggatgttctatgctaagtcaaataagccaagcacagaacaacgaatatagtatgatctcacttatatgtggaatctagaaaagttgaactcataggaacaaagagtagaatggtatttaccagaggatgagagggaagggctgatggaaaaagtaaaaatgttggtcaaaggttacaaagtttcagctaaacgggaggaatacattttattgatcaattgtacaacgcgatgaccacagctgctaataacgtgtatttcaaaattgtgaaaagagtagattttaaccattctcaccacagaaagataagtaggtgaggtaatcaaattgttaatcatcttgatttaatctttctgcaataaccatatatatcaaaacatcatattgtaccccataaatatatgccaagtattatttgccaattaaaaacttaaaaatataaataaatacaaattaatactgtctgtagtcttctagggttaagagaatcaaaagatctgctttagatatattagaatgtagatatctataatgtactcaaaaattaagatggatgttttaattcatttaaaaatacatttttgttgttgttttgtttttttgagatggagtctcactctgacaccctggctgagtgtaggggcatgatcttggctcactgcaacctctacctcctgggttcaagtgattctcctgcctcagcctcccgagtagctggcattacaggtgcccgccaccacacccagataatttttatatttttagtagagacagggtttcaccatgttggccaggctggtctcaaactcctgacctcagatgatctgcttgcgttggcctcccaaagtgctgggattacaggagtgagtcaccatgcccggcctactaaaaatactttttaaaatgagagataaaactagaaaacctacaaatgtcaaaaggataatagatatgttgttcaatgcaggctgctacaacaaaataccatagtctgggtggctaaaacaacagacattaatttctcacaattctggagactgagaagtccaagatcgaggtgccagaatattcagattttggtgagggccctctttctaccttggagagtgctgtcttctctctgcatcctcacgtggaggagaaagagagagagaggtggtatcttcctcctcttataaggacactaattctatcctgagcacactatcctcatgaccttatcaaaacccaatgacctccaaatgtcacagctccaaatacaatcacattgagaggttacgactttacatataaatttgtgagcaggaaaaacaaatattcattccgtaagagaagaatactacaaacagccctacaacataattttcatgaattagatgaaatggaaaaattccttaaaaaatacaaactaaaataattcaccaaagattaaatagataatttgaatagctttatacctgttaagtaagtaaatttaatttacaatttataaaattttccattaaaaaaaacttcagaccacatggtttcactggagaattctatcaaacatgaaaagaagaattaacactaattcttcacaatctcttccagaaaatagacaagagttatacttcataattcattttatgagtacagtattggcatgacacaacaactagagaaagacaatatcacagaaaagtaaagtatagacaaatatctcttagaagtatggactccaaatcataaacaaaatattatcaaagagaagttagcaatatataaaaagaaatatatattatagtcaggtagagttcattccagggatgcaagcctgggtcaatatttaaaaaatcaaagtagtacatcatattatcaggccccccacaaaaaaaaatcacatgattatattcactgatgcaaaaaaaagcatatgacaaaattcaacactgattcatgattaaaaaaaaatccaagaaataggaatagacaaactgctttactttgataaagaacatctacaaaaacctactagtaacattatgattaatggtgaaaggctgaatgttttcacccaaagataaggatcaagacaaaaaagtgcttcaaccaatgttattcaacatagtgttggaagtgctagccagtacaatgaggtaagaaaagaaacttaaaggcatacagagtgtaaagaaataaataaaatctttccatttgctgataagatgattttctacatacaaaacccaaagaatctataaaaattaaaatttctctttttttattatactttaagttttagggtgcatgtgcacatggatgaagctggaaaccatcattctcagcaaactatcgcaaggacaaaaaaccaaacaccacatgttctcactcataggtggaaaaattaaaatttctagtataaattagtgtcttcaggaatgtcataggatactagctaagtattcaattatactacttgaaaaaacctgttgtactagcaatgaacatatgggcactaaaatttaaaatacaatatcatttacaatgactcaaaaaatgaaatactttggtgtgtgtcaaacaaaacatatacaagacttgtgtgctgaaaattacaaaaactctgataaaaaataaaaagatgatttaaataaaacatagtaaagatgtcagttctttactgcaactgcaagcaaaattacaagacttttcgatcatagacaagatttttcaaaaaaatgtatatagatgtacaaaggaactagaatagccagcacaattttgaaaagtaagtcttgaaatcaggtagaatgactttgagacttatatggctgcagttctcaagtttgtgaggtatggttagaacaacagatgagcacatggttcagtggtacagggtagaaaatgcagaaatagagccacacaattatgcacacctaattttgacaaagatgcaagagcagctattcagtagaggaaagacagcctttcaacagtgacgctggagcaaatggacatccataggcaagaacccaaccttggtgaagatctcacaccttgtataaatactagctcaaaatacatcacaggcttaaatgtaaaatgtaaaactgttaaagttttagaaaaaaaaagaagaaaatcttcagaatctagggctacgcagagtccttagcaatgttcattgctggtagaacagatgttttcaattagtatatattccaaaaacatgagccataaaaggaaaaattaataaattagatggcatcaaagtttaatactttcactcatcagagaccctgtcaagacaatgaaaagacaacatacagagtgaaagtgaaatatgcaaaccacttatctgacaaaggatttgtatctagagtatataaagactttgaatattcaacaatagtgaagcacacaattcaattagaacatgagcaaaaaacatggagagtcatttcaccacaaaggtaaaacagatggcaagtaagcacatgaaaagatatttaatagcattactaattattgaaatgcagactaaaactacaatgagttattactacacatctattagaatggctaacataaaatcaaaaatggtgtcaagaccaaatgttggcaaggacacagaaaaactggatcactcatacatggacagtgaaaatgtaaaatgttacattcactctggaaaacagtctggcggtgtcttaaaattccgaacatacatcacctacaaaacctagcaattgtactccagagcatttatcccagagaaataaaaatttattttcacacaaaaacctgtacacggatgcttatagcattttgacttgtcatagtcttaacctagaaacaacctagatgccttttaatgggtgaatggttaatgaaattgtatatgtccaaaccatgtgatactacacagcaataaaaaggaatgaactagtgatagacacaatttagatggctttcaagggaattacacagagtgaaaatgccagtctcaaaagattacataccacatgattccattcatataacattctcaaaatgacagaattataaaagtggagaacagattagtgggtgccaaggattaagcaaagggtgggggcagaaagaagggcattcgctatagaagtgcaacacggcagatccttgtggtgatggaagtcttctgtatccttattgtatcaatgttggtatctgagttgtgatattttattatagttttgtaagatgtcaccactgcagaaaaatgagtaaattgtacactgcatctctctgtattatttgcttataattccatgctaatctacaattatacccaaataaaaatttaatgaaaaatgtaataaataaaattttaaaaataccttttgagccccttctatgcactactgttttaggtgctgaatatacatgagtgaacccaatagacaaaattggtgtctcatggagcttataatggggaacggggaaagaaacaacagagcaggcaaagggacactgagcatgtcgaatggagggaagggatggcagggcatgtaaagcaaggtgataacaaaagtcctcaagagaaagtgatgatgtttgagtaaaatttgaaggtggtgtaaaagagacccatgtagatacctggaatgtgcacataggtgctttctctgtatatgtaactttctgtagaccctggacagtcagctaataatccacaaatcaatctgtttgaaaaaccttctcaaaatcagccctctgtagaaggttcatttttcacattgaagcctagagcaccagcatgatcaatattttctctagggaaagtaattactaatcaccaattgtgttggatgtgtgcaaggatcccactgcctatatttgtgtattgttggggagtatgcagggaaaataaagttgtttaatgctatccttgggaaaacacaaaacataattaggaagagaactatacaaatatcacagagtattagaaaacaaaaatgttcttttaatgatcagctaatttggattagatataactaccactagcagcaatatcaagaatcaagagttgcatgttcaataataacagatgtctttaatatttcagagatgtttgagcaaagccactgtcatttacaaagaaatataagtgaacagctcataagggcttaaaggttttcgagatgaaaccagttttggcacatggtaaggggactactaaaattcctaacagtaaagttacagaaaaatttagtttaaatgcaaaccagctcatcatgtgataagaacaaaaggttccttgatgagtgatgattccacaagcaactactggccatgtgaaataagttacagaaggacaaagaagtgtagactcatttcaagatatatttctcctaattgcattttggaggaaatgtttttcagagcagctcttttagagaaggccaaagtccaaatatatgaaatcttaaatgcacttagatgatcctcattgcttcttagaatggaaaaataaatgtgactgattgattaagggaagaaagttggcttctcttcaaggaatgacgagtgtagtgattcccaagaagactcttctcacagtggagttttctctcaaagactgctcctctcaaaacatcgtggtgtgttctgtgtatctcagtgggaacagacattgttatgcctttcaaattgtcacaagttgcaaaattaaacatgtgcagcataaaaatagcacaccatggggctgcaaagagaagcagagcagagccttgcggcaaagtcacaggttttgaaagtgggtcttgataaaatatcagacttgctactgtccattagagaggaactccccagtgccaggtccattattattccagaagctgttcccctacttcactgagtaaagagcctgccatgacactaccaatgtttgcatcaactttggttatagctctgtgaatacaaagcaagtcaaaatcaaccctactggcataggaagtcctcctttagtgtggctaggtctaaattgaccacaaaccatacgataaacattttaggtaatgtctaaatgatgccattgttgaggctttctgccatagtctaatgtcacacaatgaagactaaatcattgatagatatgaggattctgtatcaccttggtattgagtgtgacaatgtgaacaaatatttacatgtaaatagattcacagaagtatctactaaatacaaattatgagctttaaaaagtaaaacaaaacatcctggagggccgaagaagtgaaattttttctagaagatgagattgaactattctttgtttggttgtgtttttaaggagagccactgtttgttattcatgagtgttcagaggtaaggaaaagtgtttatgacatatgtgtagattttggacaaatagtccattggaaatgtgcaccaggtagaggtaaggctccattgatgagaccccacccaccaaaaactctgtctgaagtcctcattgttgttgttacaggagatgggagcagatgtgattagctgagggagagccctgagagtcagagacagatgtttacatcatactttaaaaaaaataaaaatacactggagagtcctgtccaatggagacatgactggcatcatgggcttggaatttggattctgtgtcagcatccaggacttcaaaaaaggaaaggttgaggggtcagtatggttaggggagctaagtttccagtcatagatttatacctagattataagaaaaaaggatgagacgtgtcctcaagcccaatattccataaaattaggctgacattatcctgaaacacacacatacacacacacacacacacacacacacacacacacacggataatgtcagctaatatacatatacaaaatcaacttatgagaaattctctttttcccactctttggtgggtcatttagaataaggaactggggttctaatttcacactggaacataatatcatattgtttacctttactcagatgcattttctcagctattaaacagtcatgcagtctcctgcctgacaaaacacatgtagttataggaagtattaaaatactaccctacaattatataaccattttaaagtgttaatatataaactttttttctttattgagatcactggagctcatccacttaattgtatttacactcttacccattttttctcaaagtacaatgtttggcctatttgcatcagaaccacctggaatgcctgtttaaaatgcagaattcttaggccccgcctccaatatatagacagaatttctaagtatggggtgaagagtcttacagatttgatatctcctgaattctcaaaaacacagacttttgataatcaaagcgacataagccaaataccatcttggaatgagaagtcaaagaacaatcaaagagcaagctgaagatgacaaaattatggctctataaactcccaataacccaccagatatttctgcctaaagccacctgcagaccactgagaggctgggatgtggtcttggtaatgcattcccagccttccatttcaaaacaaatcacaagtgagtcaaggaagcctcattttcagttatatcaaaggcaatcaataggcagctttaaaacaatgaggttgctcatttggcttgaacagaagtcatcaaccgcaagcaatcctgtggtgtccattggaacctaatggactcacacagatttggtaaactttttacaatattttacattgcctttttacaatattttatagattagccagttaactaatatttaaaaacaattaggccacatatgtgatttaaactttcgaattcagcatgctattttctccccttcctttattaatttttctgcagattagtattttttaaattttattacatatactattagactaatataaatatgagtaagctgaactctaacaaaaatatttgtgtatattttttaagggagaggcacagaactttctgtctcattctgttgtgaggtgagatccccaaaaaaaaacaattgtgagtctggggtaactaagtgaaggacaacagcataataaaaaaagaattaaaaagaacaataaatgtcctgaccttcccttggcccccagccaacatatacagatgatgagttgactcagtatatatttattgagtttctacttaccaggtagaggttgagagctgagtttcagatgacgttaagatacaaactgagtatttggaaatgatgatttaccattcagaagaaaggtcaatgttgaaggtcacatggtgatatcattcctgaagacatagcaattaaaactgaatatggatagaatacctgaaggagacagaggtgccctacaggctgttgtcacattgtctcagttataaatggcattgccctatttttcacttgaaattgaactgttttacactatttctttatcataaacagatactagtttttaagaaagagaagatgcaaataattttttttaaagttaagatcatcaacaaaaaaaacaggtctaaatattattaaaaaataacggtagtattaaaacagaagtattcttgatgtgctcagtaaaaaagattttgtgacttatgtaaacacctaggaatagtagaggcaatggtattacagaatcacagaaacatatatactcagtgatgtcttgtctacaccaggttacaattctctttagtgtgagtaatcccttttgtgctaaaatgtccagtgatgcttttataactaactacactaatgccataggccaaatgccaaaagagaagcacatatcctagtccaacagctaataattactgacatcatataatgataaccaccagagctgccagcacatgcaacttttagattaaattggataggagggcccacattggcatgccctgctggaaaaggcagcaatagaacagcaacaagacataactgctgtcattcttcccaaattatatattcttgttttgacttacataaggcagaatattagatgatgtggaagatgaatacctctttagcacttcatcctacaaatctaaattcaatttcaactaggtaaaggcaaagcttggctcagaaatcctctgtgccttttgaatgtccttgagtgtttcctaaggattcatttcccaacagcagtctgaggacgaccacactcacacactcccctggaacttgctgccatacacccttctcatcagagaagcgtgattaaatattcaggaccctgccatcgtggtgcatagcaaagtaatgcagggctctgacctcctccaggaaaatcagtcagggaacaaatgcatgacaacaggtggtactaactgcgtactgtaaccgaaaaccacctaatgcagttttcatgttacacactctccaatgctcactgcagaagatgttgtactaaaagcttttttaaatgcatgctgcaaattcatatgcagatccagccacagctgaccttcggccccatgtgaactctgtagccaacatgtgcctggaagaggaggcagtggaatgagccctggactgagtcaggcttgtgtctggctctctcaaggactaaagttgggcaagctgcttcaggtttcaatctcctgatatgtaaaatgaaggtattatattaaacaacatctgttttatgttccaattcaaaaaaaatctagagatagaattctaaatatcattaaaatagccaaagaatgccctgtaatgtggatctactttgatttattcacccttacccctattgataaactttcaggatgttttcagttgtactgctatttcaaacactactgcaataaccagccctgtacacatatcctcacaatataaagctttattttttctatagattaatttcattaatgtagaggcacgcctactacctatggttaagtaataaagcaagttaagaagatatgtacatgtgatatgtatgatcctacttttatgaaataaagctacattctctatggggtagatttcgtttgtataacattgcagcctattttcttgaagggagagaaaagatgctataagaaaaaggaaatgggccagacacagtggctcacgcctgtaatcccagcactttgggaggctcaggtaggcagatcatgaggtcaagagattgagaccatcctggccaacatggtgaaacttcatctctacaaaaaatacaaaaattagttgggtgtggtgacatgcacctatagtcccagctactcaggaggctgaggcaggagaatcgcttgaacctgggaggtggaggttgcagtgaactgcagtgaaccaagatcgcgccactgcactccagcctggtgacagagcgagactccgtctcaaaaaaacaaaaaaaaaggaaaaggaaacagcaacaaaatggaagttatcacaatatagtggtaatatttagaatataaaactaaaatgtgtaaaaatataaaacattttcatatactgctttgaaaaagaaatacagattaacgaaaaactgatttcattaagagataaaatatataggcaaattttaattggattccttctgttactgtttttcatattgtttttgcagaaaagtaacatgcagacaaaaagggaactaatgaacctgtgatgtgcatttccctgagcagttccaggactgtgaaatcccaatgatatctacttattctctatgggaaaggcaccaggatgagaaattctcctgaactgtatgaactaatcttcacaggaaactttttaagtaggttttattatccttcaaaaaggataggaaaactgaggctgggaagggttaagtaactggcctatactcattgcagcataagtatcacagcttaaatgtgttccattctttgcctgaccccaaacctgtgctctaaagcattgtggaacatcaaaagcctctctgccttccctacagtccaaaaattctcaattttctactatgggagctattaaaattacactagataaacctgtattttaaaagtattcaaaacaaaacacaacacacttacttagagcaataataataaatattacagaataatataatccttcccgttctaaaatatttttaaagaatatgataactttatattgggtcctagataccatactgtatttagggaatttaccaagatagagctggctttattgtaagtcaagcaaaatgaactggcgttcttgtaagctgggttcagtctactattatcggttctgtacagtgtctcctcgtgtgctagtgaaacaggatggggggcgaggaacctccttcccatcttttactagcctgagaagtatcttttcaatattttataattttgcctttggcaaagggctgcttatctcctgggaattcaggcacattttgaagatttccccatagccaatgagcacagaatgattattctcacaaaagttcttaagaaatgtcacctctcttgtgtctccttctttctagataagctctccccacacctttctcctgagacagtctagaatctcccttttatattgctgcagaaacacagactcatttccatacacgtttactccggcacctatagcatagatcaatgctatggacacgtgctgttgtgtgagatttaaaagtaaattttccattcagagatttttaaaaaaaaaaatctggtcatagcagccattagtcaacttagtcttcattgccctcctttttatttctaagcatgattcattcaggatataagattgcatgggcaatcattctagtattaaacaccttggaaagatgaggaccatcttcttcctccctgtgtctgcttctctttctgttccatcttctttccttccccatttctttcactctttccttccctgtccaggtcctgttgaatgctgactcaggccatctgtgctttccaggccagctctttcacttattgctcatgattttggccaagccatttaaaatgcctaggcctcaatttcctcatgggtaaaggaagctaataaggtctacctaatggacccacccaataaaattcttttgagaattaagtgggaaaatgtatattaaacacattggaaattcttgtctacaggggatatgtcatcaatgggagttgttactgctgctgtttctactagattccaaattgagaagaaaatctttctaaagcaagtatcaagtagagtcaggaggaagcatctaaagtttctgcaaggaccatggcacatcttcttgaacactgctgggatgattatttggataataggagttggcatcattttcattattttataggcaatatagaaatatatctgcactcttctttaaaaaaattactaatacataatagttgtatatttttatggggtacaagtgatattttgctacctgcatagaaagtgtaatgatcaagtcagaatgttaaggttgtccatcacctcgagtatttgtcatttctaagtgttgaaaatattttgagtcctctcttctagcaattttgaaatatacaacatattcttgttcactacagtcaccttactctgctattgaacattagaatgtattccttctacctcactgtatgttttacccattcaccagcctctcttcctacatgccctgcccacacataccctctccagccttttttcccatgttctctttctttcatcacataaacactggctttctagtcaatgggaaacaaattaccaaatggtcatatttcacagcacaagctcatgtacaaacccatgattagacttcaatcactcaaaaaaattataaaattcaacgaaaatgatatgaatatgtatgcattttctgacagaagagtccagcacttccactcaattctaaacaaattataataatcctgaagtgattctatactggatatattgtgtgtaaatacatcatcagatttatttttccctggaaacctaaggaataagtttaatatactccaaaaatatagtctagtgcagtgttttgtcacctttgagatggtagtcccctttgacagttttataaaaattataaactctctctcaagattaataaattgtcatcaataatggctgtattttcaaaggctcctagtggtaagttctccctcatagcagctaggaacattccatctctcccttccttgacatattgactactttacaatctcccctgatatttctcggctctctagtctcctttgttctttgagagaaggccacagcagtcagtctttctacagcatcggctacctaggacatggacagagaaggaaagggacaaggggaagggggcaaaaagaagatgggacagaaaggtaagagagtcagacacagggaggaaggagatagagacaggagagaaggaagaaagaggaaaggagaagaggaagaaagagagggaggaagggggggattaatgggggaaggagaagaagggaagagagaatatgacttggtagcttttagtaggtcaagaagtaggtttataagaaacacctctttcaaacctctcaacttccttccccattcaacacatttgctctaagataaaggtgaagtaattgagaacagcctggcctacagcttttaaagtgacctatgaatggatattataaagaatgtgttagtaatttccctttgattattttattttattttattttattttattttattttattttattttattttattttattttattttattttattttattttattttattttattttattttattttattttattttattttattttattttattttattttattttattttattttattttattttattttattttattttattttattttattttattttattttattttattttattttattttattttattttattttattttattttattttattttattttattttattttattttattttattttattttattttatttatttttgagatggagtctggctgtgtcgcccaggctggagtgcagtggccccatctgggctcactgcaagctccgcctcccgggttcactccattctcctgccttatcttcccaagtacctgggactacaccaggttcacgccattctcctacctcaacctcccaagtacctgggactacaggcgcccgccatcatgcccggctaatttttctatttttagtagacacggggtttcaccgtgttggccaggatggtcttgctctcctgaccttgtgatccgcccaccttggcctcccaaagtgctaggattacaggtgtgagccaccgcgcccagcctgatgtattttattttacacaaccaagttactgagctatactttactgacaaactatttcttggagtatgaatgagggggacaactgcctccttagtgaactgaacaaaaaaatcccttctatgccagttttgctcttttgtcttgatacaacattagatgtctctgacatttttgctacaaaataaattattttcaacacagtttaacaaatatgaattggatttcttatagctttcttatactgagccaaagaaatagaaaaattatatctgctctaaaaattgagaggactgcaaatgtcaggggtgagttgcatccatcaaaaaaagtcctaactgaaaaaagttattttttctaaaaattaatttgctttcttcctgaaaatctctactgtttccatgatatggttttcaatcttttctttgtgcttctgatatcataattgcaaaatatttcacttgactctgcattatttattcacccatcagtcagtcatttattagggaaggaactgtaaaatcaggttactttgatacgacttctctgatttcttcaagatcaacattaaagtggaaacacctgggatctaaataactggagaaaatttgcatacaaaatgaattagcatcaccattaaaaagcctcttttatcctaatctgaagtttatggggagcagctaaaactaagaataaaacaaatcattcttggtcagctttgatggtcagacagttgtctacggaaccccaagtctatgagcaaagtgactcagtttacgtatggggccaacataatagtctttttttaattttaatttttatttttgagatagagtcttgttctgtctcccaggctggagtgcaatggcgtgatctcggctcactgcaccctctgcctcccgggttcaagcgattcttctgcctcagtctcctgagtggctgtgattacaggtgcatgccactgtatctggctcattttttgtattttgagtagagacagggtttcgcagtgttggccacgctggtctcaaactcctgacctcaggtaatcgcccaccttgacctcccaaagtgctggattacaggtgggagccactgccaccgtgctgggccggtagtctttagtttctgagaagaggcagaaacggctagttccttaaaaccctgtaatgaggagttactgggtaaagttagaaagcttaattataagatggtctgatggacatgtttacccccaacgagtgagtcaatttagatcacattttctgctttccagactgattattaacccatttgtttcctcacctccaaagctggtggtgactcatcccatgctaaaacggccttgttgaagggaacaaatggctgtgacctgatattaatgtcactttgttcctatagccattcctccttttggggtgactgactattaagaactcaagtgtaggtaaatttagaaatacagaagccacttctctccatacccaggtagacggaaagaatcaagttctcatgctgggccagtgtgcccactatccttccaaaggtgaaactaccacactggagtttcttaatttatttccccatctgatgggtttcagggatgcctgcaaatctcacctttctctcttacactcattattgtcatagtgtttctcaaactcagcactattttgggccaaatattttggtttgttttggaggggtatcctgtgtattgtaggatgattagcagcatccttggcctctatctactaaatatcagaagtattctcccactgtagcaataaaaatgttgctagacattctctaatgtcccctaggggtaatatcaccctggatagagaaccactctactaagtctacgaacttgactaatgagagtgccatggattcttgatttcagccctagtgactcagattttacacatgattttcacaatattatctatataatttgctatatattaactatataactccctagaatacactggcttataagcaataaatcaaatgcacttggatttagcattgagcattttataaccctcaaaaaaagctgagcctttgtttttgtaagaatttggctatggcagaaccaatgagaccatacctccccaaaataaaacccatcttgcaagttatgaccacctatattcaaatggtagcctaggactggagcaaagagcaaacagctatcagttcttaattttactcttgattgcttcttatttttctttactgggttgaactgatcagactttgcacatattagcctatgtgacctaattcttttcctcctatgttttctgtttcaaggctcttgatcactgtcattttcattggccccactcctgcgtaatagttccttctttaatatagttctcactccaacttctgttttatattccaaatctgtgatcgtcacttttctctttcatcttttaatgcatcaccagcttagacctatggtacccagttggcctcaattcactagtgtcatcctggcatctttttgacttctctgttctgaatctgttcatttcatgtcataacagatcacttagaacatgaaaaagtaagagaaagcaatttaacaaaggggcaaaaataaaaaaccatacattctcagaaataagcatgcaaactttataacttctgagaacaccacattatcacatgacagtgtaccaagtgtcatttgcagtaatgattttgagccttcaataaaggagtatgtgtgctctccttaagaagaaaaaaatactatatttagaaatagtttcaactcatctggttaatatagcagttgcaacacctgaagtgatgagctcaaattttctgcaaaacacagttatgtgaaacactatgttacctaaatatttattagccaatttgtatttatgcttattatgttgaattgtatatggttgctagttttacaaatattataaaatttggtaaacattttatgaatattaacaattatgtattcaaccaaaataatactgaaaggttttttttgttttttgtttttttttcaagttccaggatacatgtgcaggacgtggaattttgttacttaggtaaataaatgtatgccaggccataccaccctgaacatgccggatcttgtctgaaacttctctaaatgcaagacaatacaaactagcaatgccttcttcaaaagccaaacacacttaaagttttatgaaaataattttcattttgctaatgtttcatcaatgcttccttcttgcgtggatagcttcatgattccagaaactcaagaacattaactgaacaatcaactaaaacagtgcaagtaatgactccacaagacagcgcaagtaatgactctatagccaatggataaataagaaaatgaggtgattattttaattagcaaatctatttgcaaaggacccttcacggatcctcaagtttctgttttgccatgtttagtgcatttcaattgcaaatgtcaacaattgcattttttggattctaatctccagcagcataataaataatgtgcactgcatttgtcattttaagatgacagcactcagcggtaagaacctaacaaacaaaacaagctaaagaatcattaagtttcagtacgcaagtgccaccttaacaagtgatcattgaagtaatattttctgcaataaaacccctacagttgctaatcattgatgatagctgatgctagaaaccaaaaacagatacacatcttcagtacatgagatggaatataagacagaaagtaagtaaggagaaggaaaaggagacagaaagaaacctaattatatcagacacccaggaactctgaaatgaactcgtttcatctcagaggaacatgaagaaatatagaggagtcaatttaaatttattatctgcctgctgctgtttcagctgctgctaacagacgttgcatagagaacctatggggagaacagcatttttatatgttctcctggtaagaagctggggtgagggtgttgaggatgaatgtaaatgtgaatatatggtacttcatcaggaccaagttttatgttaccatctcaagggagctaagtaaaataaaagttcaatgaatatttgctgaataaataaatgatgcagtgattccaagactccctagaaatccattgtgtggttcagtagagtctagtactgaaccatcacctctcatcagcagtggcaagaagaaatctttgtgtcaggtaaaagaagaaacaataggggccaggcatggtggctcaagcctgtaatcccagcctttgggaggctgaagcagatgaatcacctgaggtcaagagttcaagatcaacctggccaatatggggaaaacccatctctacgaaaactacaaaaaattaggtgggcatgggaatgggcacctgtaatcccagctacttgggaggctgaggcagaagaatcacttgaacctgggaggcagaggttacagcgagctgagattgtgccattgtgctccagcatgggcaacaagagtgaagctccatctcaaaaaaaaaaaaaaaagaagaagaggaagaagaaaagaaaaagaagaagaagaaggagaaggagaaggagaaggagaaggagaagaggaaaaagaagaagaagaaaaaaaaaacagggctactgccagttatttaataccttttctatatctgctagcatccaccaactggtgataagagggacttcttaatcttaaaggctccattgaaacatgtctccacttctctcttaccctcaggaagtatgcactaggccagttgcgttcaataccacatacagagttttccatcataagtacagtacatatttctccaatttttttcatgtaaaatataaattgaaaaaaaaatcagtgcaacaaaagaaaatattcaaaatccaaagacaagtggagcctcagagcaaatagatgttaagaaaatccaagctagactctgccttcttgattttcatatctaagtgatagaaaacttttttcttattttgttttattttctttatttgttttacagtaaaagagaatgactcggagctgttgttttttttcccccattctgttttttttctttttttttttttcattgtactttaatttctagggtacatgtgcacaacgtgcaggtttgttacatatgtatacatgtgccatgttggtgtgctgcacccattaactcgtcatttacattaggtatatctcctaatgctatccctcccccctcccccaccccacaacaggccccagtgtgtgatggtccccttcctgtgtccaagtgttctcattgttcaattcccacctatgcggtgtttgtttttttgtccttgcgatactttgctgagaatgatggtttccagcttcatccatgtccctacaaaggacatgaactagtcctttattatggctgcatagtattccatggtgtatatgtgtcacattttctgaatccagtctatcatgatggacatttgggttggttccaagtctttgctattgtgaatagtgccacagtaaacatacatgtgcatgtgtctttatagcagcttgatttataatcctttgggtatatacccagtaatgggatggctgagtcaaatggtatttctagttctagattccttgttctttaacactagagccttagttcggagtttggttaaactgttcagtgagctaactccaacgtttacatagaaagtactttttccgtgaaaacagtgtgatgtaatgacctaaaagtagagattcagtgacagatcacctggatttccactctaatgctgcctttaatggctgtgtaataatggccaagttacttaacttgtcaccaaaagattatgtatgattatttctgcattcaggggatctacagtaatttatgttttctagtttatgttttatttttctgatttctataattcctatagtgaacaaattttaaaaaaataagaagaaagaaacttcaattggtgacaaggtatcaagtaaaaatgaacattaaatgaagcaccaccttaaatgctacactttacaaagttcgacttcagctataatcaacatagtttctaattttaatcagttaatggaaagcataaatcagccactcaatttttgcttataagtaatttctgggggcaagtatatatcagagttgaagttcttgatcaactaactaaaaaatcacataaaaattctcccaccttctcattatcaaacactatttggttttcataattgcagtgttgagctctgacctacagataatgttctgatacatccaataatacttttgctgctacatcaataaaacatggttgtaaactcagcacttgccattcacatggctaacacaattatgcccgtctccataataatacaccaacataaaatcatcctcatggctacattaaagttaatttcctccaaattatatgctgtgttcataagacatgactgtgcatttagacagtgcttacctgttaaggggctctgaacactgcctgtgtgtatgttctatttatgtgtatacatcactgatgcaaaaagagacagccttttatttcaaaggtatctatgttctgatttgcactaaaaacttagactccttaagatcataaatttcatattcaatcatagtaccattctattgagctcattattcagtctttcaccagtacaaacaagaactattttatggaaagccattcatttattcaatctactgctagtgctaaagaaagctgtaaaagtaaatctaagccagctctgcattttgggatgtcacagctcaactgggaagagaggtatgaaaacaattccagtgtatgcagggctgttatagccacactttaggcatgtgaggcgggggagatagggaagaaagaaaatgtgttcagggtaggcgttactaaaaagaatttgcaatgagtttcaggaaatgagtaggtttttggccactgggtaggagagaaaacaaggaaatcccacattctaaagagaaacagaatacctgaacagcagagacatgaatgagcaaggagagaaaatgacattgtaagaaaaatgctcccttttcctcagccaaaagttttcttactttcagttaggatatgcagatttaattcaacacgtcatttgggcaaccactagaattttcaattgagaagagagaaatcacaagtcaattcaaattataaaagcaaatttggcaagatcatatggttactgccgtgctagagggagcggatgggtatctggttctctttgatgtggcctgttacagctttgtgagtccttgctaaaatgtattattgctgccattttactgtgcatattacgttctgctctttccacatcctatggtaatatttttgtgccactctatggttaaacataattttaactattgcgactatatatgcattggcaattcagtatgtgtaaccttcaagggaatagttttaaaaagattctccgtgttaacaacatggtaaggaaagtgaggtcttcagacaaaaacaaacaaacaaaaaacagaagttccataaggattctcactgtctatctacctagacatttgttttacatatatttctacagaataaaatttaacaatatagaaagatctaatgggtctatgaaaagatttgctgccactgtccccaatcctattcattttctccaagatatgatttcacatagatgatataagttcttcgggcatgtggactcagatttcacttactaaaaacaaaacaacagtaaaataaaatctgtgatgctgctaaaattcatatatttcccaaatttgaagaccctcctttgagtggacagggtccccaggacccatattagaaaagaagagcttttagagaatattttgctaatattcactgctgcttctcctttttttgtgtgcagcaacctcacttctgatgagcttttaaacccatagccagctaaatcacatgttaggccttcacctagtatatttacccatcatctctttccagtaatgtacagcttgcctaaaatgatgtaaagaagaaatattgagttcagtatggctagtggagacgtggtttgtaggaaaacataggagacaaggttaaaaaagcacaaagaactcacaacaaatggctcagaaaaagaaagtttggtgtcacatgggagctcagtcatacatggttaaggaattaatacacgtaaattcctagccatacacatacacataatctatcctcaaaggtatgtgcaaggctcttcctagcctttagatcaactcaaaaaggagaaactttgatataataaatttctcagggattatctggttgtgatctatttaatacaaatgagtctggactatgaaaaacacagttttccttgagtttagatttttagggccttctctctgtagggcattaaggcctcacagggtcatgatcattttataatctttaggaaaagagccaagcacattcctcagccaattttatatgcaggccttatagcagagggggaggagcaattctacaacttgcagaagactcagggaagattgtcaggatgggagaatgccatatgagttggagagaaggctccaagcaggtcctgaatcagaatagaacctacatgaatgatggtacatggtcaaggatttgcagatttggatttgtacatctctatctcttttatcaaacacaactggtcaaactatcacagagcatagacaatgaggtgtctaagaaagatccctgagagccaatgaggtacagactaagagaatgggttttgaagtcatgtaaacaaaagtctgaactccagctttccaatttactagttattcacccacaaaatattttcttggcctctctgagtctcaaagccatctatataaccctaaaatattgtgggaaaaaagttacaaataatacaagtgagatatttggcatgtgtttgacattcaacatgtatgaactattattacatgaacatcatctaggaatgtaagtgagttacaacactaaagtgcaatatttctgcatgttgcttgcggagcaattcatcactttgtggagcaattcatcactttacataggctcagtgagggccttttttttttttaacctcttcagtatctttaaatctttaaagttctgaaaaaaataccgtatttccctctgttggtctaaaagttactattaaattcttggatttcacatataattttatgctcatttagtaaatacatgcactttacacataacttttcaaagtattatcattttgaagtgaagagatgatggagactgaaaggttccattaaatatcttctgctcagtgaagaaagagacagcttgcagggcatgcttaagagacccaaggagtgtgtgacagtctgcagcataacagacctaaccatacagtatccaaaggtctttggacttctagcctgacattctctttcctacattatcttttgagcttcctctactcagtccttactctttcctttctggagttgctttgtaaacactttagcttcacagaagttcctgtgagatgtcaaaatattccatctctctatttaatcagtctgactttgcgtctaaacctagtaaatttgggatattatttgtttgacacctctgccttcacaaacctatgattcctaatattcttggttaaggcatcacagatgccttttaaaccaatcattcttcatcaaaacacaaatccagaaaatcagacttcttagtaaatatttcaaaacttcctatacaaaaaaatccccagctccctttcttttcttagacttcctgtcacaacattcacaccatttgtgaataacagtctggagctggtgtgttagagtcaggctgaaaaattggatacctcagatgtacttcgaagtcatccataaaatactcaatggagaagaggcaaggaaacccattggttacaaaggcagcaaaacgaagtaaggccactgccagtggatcatgagaaaagacaagagacattcaaagacacaattgctatctatgatgcatctggctctggcagaatgatagacataagccttcagctctgagagatggagaggattactgctttggaataaggccctgtaatctttgcattagtatatctgaagcaaatgaccttattattttgatattctaccttaccttctctgtaactgaaaatagaggacaccaaaacaactttgtttggcaatatttttcttcttcattagtgtttatttccccttagaacagttcaacattaactgttaaattctgatgaagactgttttattcttggtgatttcaagttacaagaaaagcacctggcacatagcaggtatataataaatgttataaaattgatttaataattaattaattatcaggcctcttctgccctaaaagagagatggcactctaaaaagaagaaaataaattctgtttctggaagagtaaagtgaaaggaaatctatcactgatgtgtgctgctttggcaatatgtgttttcttaatctacagcaaacaaatgttatataggttagaggtatacatatggaaatagctcaattcctatcaagtttatttgcctagaatctatacagtaggaagtctaaggatagcaatattgtgtctcataacttcattaattttgatgcttagctccaaagcaactgggacatcagtgtactgttagcctggagatgtttacttctcctttcagcctcctcatggataaataacaaatcagtactactgaaatgagttgcttctggggcaagcaatgaagcagttgttccctcagtagccagctccaacagcctttacagtctctcaaagaggcatgtcttctgcttactaataaactgtattttaagctgccaaaaaagcagcatatgaaacactaaatgtgaaagtgcctaggcataaagataagtctcacgtagcagaggagggtgagtaatttttccctaactatgggatgacctagagcacaagttagaaaaatcgtaacaagacagaaattcgaaacctaggaatgtgttcaaatggtcctggagaacattgtcatttaggccagcaacaatttgagtcctgctttcaggaaatgtttgctaagaccttaagattagattccacgtccctgtgaatacccttatctcctcatgttttcagaaataaatcatttatcactctgcactgtaattgcttctttaattgtctgcttccctccccaaatgtttgctcactgagaaaatatcctgttcaccaccatttatacagtggctagcacagtgcccgacacaaagtagataagcaatatatatggcttcaatcgatggatcaatcctgatttgtgtcaatcatacataagaacatagctataaattctcaattatctttctgtagatttgggaaagtagattcttccattattatgaggggaaatctatttccccctagccataagctcaatctgtctagggaaggggaatctacatgtttggcactacacagtgcaaaaattatggtaatctgataacttatttctcaaatgttttgttggttagtactctagaatactgaaacacatagagtggtcacatgtgccatgtatactctaaatgtgttcctccaaaattcatgttaggatcaaacacccaatgtgatagtattaagacatgggacctttaagaaatgattaagtcatgaggactcttcctttctgaacaggaattgtgcccttatacaacgtttgaaggagtatgcctttctctcttctgtccttctaccatgtgaggacataatcttcattctttccaccatgtgaggacacagtcttcattcctcccaccatgtgaggacacagcaagaaagtactatcttagaaacagacagcagccctcaaaagacacaaaatcttctggtgccttggtcttggacttgccagcctccagaaccataaggagtaaattatatataatttatccaatctgtgttgttttgttacagcagcacaaacagaccaagacaataccctacatttaaaatggttatttgtggccgggtgtggtggctcatgtctgtaatcctagcactgtgggaggccgaggtgggtagatcactggaggtcagaagttcaagatcagcctggccaacataacaagaactcatctttactaaaaatacaaaaattatccgggtatagtggtgctcacctgtaatcccagctactcaggaggctgagacacaagaatcacttgaacccaggaggcagaggttgcagtgagctgagaccacaccactgcattccagcctgggcaacagagcaagattccatctcaaaaaattaaaataagaataataagaataaataaaatggttatttgcctttgttcagaatatttttcagaacagcagcctacacacaagccacgacctaaaatgcaactaataaacaggccaggcatttcttgcacactttttcacatagtatctaatactacactgtactagttttgctcctacccaaatgacttacactttctgtcttctggactcctgtctttcaaatctcagcctcttttcttctccatctacacctgctttccaggtaattccatctcagtaaacaatgacaatttccaaatttaaatctccagcctgagtctcttccctgaactctagactcatgtatcaacacagccaattggatgtataaggagcatctcaaaactaaccaaactccaaatctcctttcctcaactctgttccataaagtctttcttatctctgtaaatggcaatacccttctcccaggtgctcaggttaagtcaaataaggcgttttcctcccactccacatcgagtccatcagcaaatggtgttggctcaatgttcataattgaagtacttcccaccactgccaccccagaactgcaggccaagctgctgtgatttatggcctatttattgcagtagcctcttcactaggtgtctgcttctgcccttgctgccttacagtctagtcttaatgcaataaccagagtgatccttttaaaacataattcaaatcatgccacacctctgctcaagtctctccaatgactacccattccatttgaggaaaaagcacttaaaccacccacatcatttttttctctgtttcctctctgacctcatctgaactactggcctcttcttcactctggatcacacagatatgatgctcttttaaaagactcaacatgccttcctcaggagtttgcctttgaggatcctcccctggggaagcccttcttaaggagatctctatgtctcattgtcttaccacccctcaaatcttagctcaagattcaacttttcaatgagactttccaagaccaccctattaaaaataaatttcctcacactggattcttctctttcccttctttggtttattttactccacagtttcttccaatatgatgccacatatatacacactcatgcattcgtgtgagcatgcacacatgcacgcttgttccttgcatttatttcttggcaaataatgtctctttgcaaataatgatatctctcctccagaacctaaactccatgatgcacagacttttatctttgtgctaagtgcttaaatctgagcaccttctacagggttttccctacccatactgaatacaattttaatgaaaaaaatacagatgtatatttgaataggaatcatttggggtctaggttgccttttgcttagtcactttccaccaacaatatcctactagacacagaatcttcttatttcattattagaaacacttttgcattcagtttaccaggcttaacataaattaaaaaggaacaaggaatacaccagtgactacttagaatagatgccactataaattttctggccctagtactaatctaggtaatataatttgttggaagcatattattattcgagaagcaattatttcagctaagatgcaagacttctgtgacgagaatttcaccatgtcctttcacataaatgcacagtaaaagatttttgctgtgttctatggagcctcaagtgttttttaaatgaaaaagatgcatgaaataaattagtaatacttctgtgaatgaaaagaattaatacaagaattctaaaagcaaaggtatgcctctgcttcattcccatgaatgtttcctataagtttacatgtgaaacagaactctgcaaattttaattttaatcaagaaactaagttgacagtttttatttaaaaatgaaatatatatttcacacactaagttttctaatttcatttgaatcttttacaaaacataaaagtattttataatatatggcacattacaaaacttgtcttgtttggaaagtatttaatgcataaagtttaataaatcataaatcagatatgatgtgtgactcattaataacaattggtttggaaaactctccctgaagcacaaattgttggcttgcttcccaatatcactgttcaatcaacagtgattgaagaatcactgttcttcaatgcctgaagctcaatgtctaaaaacagttattttatggttttgcttgttcatcatttgtttcaggtgggaggtaaatctggttccttgctggaagaagatgtcaaaaatattcagtattgcaacacggatatattattatttagaaatgaataaaataaaataagtgcctggctcagtatcacccagtgattaaattgggaaagggagagatcaacagccacatcccagatcttaaacacagtaatactctgcttcttcttaaaccctcattaacatttgcaacttaatattataatttttcaaattaaaacctcctttttctagactctgacctccttggaggaaatagttccgtgttgtgtttcactctaagtccatgtatagcccagtgttggtgcacactcaggacatgctcaggaatgaatgacagcaggtaagcgagctgcttactgggctggttctggcaaagcacaaaatcatgccagtgacggccagacaggatatatattgggggtgaggtctttgcaaggaaggctacgaggcttggagatattaatataccataatgaaaaataagtttcatgagggaaaaaaattaataaaacattgtaatgggtaaaggggatgtaggagtcacggatgtgccagccaactttatttagatatctgctaagtggaaatgttattttgattcagatttactctgaaatgggcatctgttcaggatcacaaacttatacgctggaagaaattactacataggtcacttgatcctggttattgtgcaaattaagagtcgattctaggctgggcgcagtggctcacgcctgtaattccagcacttcgggaggccaaggcgggcaaatagctggagtcgaggattttgagacaagcctggacaacctggcaaaacaccatctctataaaaaatacaaaaaattagccagacgtggtggtacactcctgtagtcccagtttcttgggaggctaaggttggagtatcacctgagcctaggaagtcaagactgcagtaagccttaattgtgccactgcactccagcctgggcaactgaagtaagaacctgtctcaaaaaaaaaaaaaaaatccattgtgacaatagacattagccttatgattaagtcctccaaataacagaggtccattatgggtgagagaggctgtcccactgttagacaattttaactggtagaaatcttctttctcatattatctagcttctttacacatcaagagaaggtacatacacacaaagagagagagtgagagagctatacacaaacgatatagcagatttctctcacaatgtttagacatacagaaatacgctttcgacgtgatagaggacggaaggagaggtggaggaggagggggtgaaaagatctaaaagtaaaatatttatatgaagagtagtttgcttctaatcacgctgtattttagttggactagaaagttctaggaatatatggcaaacaatatgccagaaatctcatgctcatttacatccccaagttattattaaattaagatattttttatcaccaccccagcacttcacccctgacatcctaaaggcttaaaatctgaaaattttactgatcttcaaaacccaatcaaagtttgcaccattagggctttatgggaacaagtctgtaactagtgatgttttgcatagtcctctgatatacaggacataactcatggttaatgtcatcatgtggttatctatataatattgtcaccatatgccatcaagagatgagattgccattttctttccatgtactaaaagaataccagacaacttggctaaatacatatggacctccaccaaaaaatcagaacagctaagacaacttgagagaaagggcagggctcaatgagaaacctcagaattaccagttgactagtattccttatttattatatatgctccagctattccaataattccaaacacacataaattacatatatataaaaatatatatatatttaattgaataaacttgattgtataattttggcttagtttttagatacatcatgagttggtacacttacttcttcagtttataaatttttaaaatatgtaaaataggtgtaatgtgcccagtaatgagatagcttggaaaatctactagtaaaaataattattcttcattaactccctttataaattatattagattatgcttgaagaccttttcagtgctacgtgctaggatgaaatgatatataattgagaaaataataaaagacatcaaaacaatagctccaggtcttaaaatatgagatatttcaaagcatactaagtgattgcccatctctccttaattactaagttcaattcccgagaagtgagaaagcagaggcgtaatattgatgatcacctattgtgttctttctggctagtctgaagctctgcatttttattaaatttccacaataactaaaatagttaatcttgcccaaagccaatccagctgtttcaaagcaggaaggagcctaatgcagagttgcacagccacaacttgggggcatcctacccttcactgatgcctcccagagcctgctcctaatgaagagcccctgcctccactctcctcatcccattccagcactgatctggggtattcggtcttgcctcagctatgactgcctcaatacattcgcctctcaaggtggcatcaggggaaggagaataccagtgctgaaaagtgatactctgtctactgatgtctgctcagactctgaggagtaatcagggtccaaatcatataaaggtaaatgagagaaatacaatttcaaaattaaaagattcatacctactccaatcacaaaatattgctcttctatttctgttctatttctatataatttcacctaaccaaaattacttaaaaagtatattgatattaaagataacatgttttaagagaaaattaaacttcctatttaacttttaatagaaaatagaaaactttcacaaactgtactctccccaagtagaaaagtacgaatctcaacgctgagcaagagtataagactttccttgggcactcatggatgattttatctgctacgtctttgtgttttatacttctcttcattttttatgcgccaatcccaatttttactccagtaccctgttgtaattaataatcctttatattcaacttcccagttcaaattactgtgtggtttctatctcctgattgggacatgactgatacacacagtgaactgaatttgataaacagtgaatcgtatatagatacagatatactactgggagatttctcagatggtctcaagtatgttaatacatgtcacaaatttaatagaagaatatgttgtctacagagtttcgcaaacttgtatacagatacacacacacatatacgcaccatggcacaagattagtgctctgtggagcatatattgggacacagatgttcgaaactatagtatagcaaaattccacctggtagaatttttaagacaatgcatgtccatgggaaatagcagtataatttttgcaagtcaataattttctcttttgataagagaagctgtggaatgatgtttttgaatatgttcatgtccttaagtacccgagcgagaaaacacttgctcatgaatatccgtatgttgctactgcaggaagagtggagattcttgtggggagtggggaggataacttccccaagggatatagcagtatcttaaaatggggacataaaaaaattctcccattttagagattctatttcatattccctacttaataattccttattcagaaagtttagccattcccatcaatgcatatgacatccatggaaagttggaaacataatcagatttttgactctttgcagcttgagacagtatcattcaggaaaagaccttgcagaggtctctgctttcagaaatatatgacttaagtaataagtgtcagacactatcagagactggggctgtgacatgctgcaggacagggcgctggtaggagctattattaccttttatgtacattctccaaaatgttgttaagaaaatgtaattaccatggggaggctcatttatctaaattattctgggctaccaaagaaacttgacatgtaaacaatttagataaggagtttaataatctagcaataccaagtgtctgcaatctgtcacttggtgcactcttattcttcggtggaacagtctgttgtccttgaagtgctatttcagtggaatgtacattaggaagacaaacgtgactcagtatcaagatagtgagttttaataaagctaaaaaatgtacaaaacagattttcagctactaatatcaaagtagaactcagtggaattcagataattggcattcttcaatccagggaactcactgaaatggaaaatatataagatctacaggaaacttcagaaaataattttgaattatattggtatttgagttagaagtaaaaagtaaaacaatcaatgcaaactctttaataatttgagtcactatgttttgaccaatactgtgctgtgtgaaagaaatacaaataaagcacaagatacaattgctatctttaaacacttgactcaattggtagacaaaaattttttaaagtggttataaatataaatagattatttacataaggaaatgtatgataaaatttcaaaaatacaacagaattttcaaaagctacaatccaggtcttgaatgtacatttaactcgagatattttctatagaaattggcattcacccagaggagcaaagccaggctctaagatttttttttaacagctgagtatttgcagtaggtgagattcacataagaccaattgcctggagtggctctttctttatgaaatagaatgacttcgctcctataaataaagattagtgtaaagagagaccaataagtttcttatttcatgaaaaaatgttttcactcattcattgcctcaactgatatttgctgaatttcttctgtgttccaagtaccatgttaagtcctgagaaattcaacagtgagataacatccttttccttgaggagctcattgtccagcaggcaagcagatgactatagaataattgaaataaaatttgataagagccataatggggcaagtaccaagtgtgggagtgcagagaaaaagaagacactcatggtatgctagagccggcttctaattggcttgtgagagccaattgctaaattttcagaaattttgttaagctactcactgaacatagcaattattaaaaattaaattggatgaagttataattcaataaattaaatttaaaacaaagattacaaatacttaaaacttcattgcatcctaattattttactatggcataatagtatctgtacattttaccttattcagttctattgcatctatatgatggaaatgccaaataatggagtgctgctgtgcacctgttaccaactccgtgttcaatgacaccacattggcagcctaaaatttgccttagtgggaggatttgcactcaggagttcagcgaagcctccaaaataaagatttgtttttgtttttgtttttgttttctacgagagtctgttgttaaacacatagcatgccactgagaacatggaacctaggtccctatctactcttggtcagagaagacttcctggaagaagaggaagcaaagataagcaaaatctgtcacgcgaagaatggggactagcctgcataaacaaaaatccaaactagaaacacctttgaagttatcctaacctctactcttacgtcttccaaatgtgaccatttgctatcatatcatatctctaatgagagctcttcacctattttctagttttcactttcagagcctttatgggactgcatttttcagtcccctggaagccatgcatggccatgtgacttggttttgcaaagagaatgcaagaagaaaggaaatcagtcatttcaaggttaaagctgttagagacggcgtgtgacttagtgtgctcatttaaccttaatgtggtgactgtggaagctgtcagcctgagtccctgaatgcctttaatgagcagtctctcaactcctatttggattggttattatattgagtaagaaataaacttagattggtcatgtatactgagtgaaaggaaaccactgagattttgggggttactcatcactccagcatggcccagcccatctcaattcacctccctattaatttctcactagaaccactatactagccacctcccttcctatggctagtctcagcatccttccatctgtcctctgtactgtagagagataggtccctgtaatactcttctacttaaacatctttaaaatatcctcgtgacacacagaataaatctatacaatttagaacagtatattcaacaagtatttcatgatcttttcctcagatatttgtgtcccaaccacactgaactagtcactttctcaaacagttttcctggcaacagaatgcccacattttgaggctttatgctatcatcccattcctcgttttgacaaactcaaattcagacatcaaataccaattattatgtcacttcataagtgaagactcaagtcacatcagttacctcttccattatctgtatttttacgagcactttgctcacacttccatgacagcaagaatcctatgacattataaataattttatatatttcttatttagatttaactttctggaatctatttttgtatcccagggatttgacacacagtgttcattaaaagcttgcgctcaatgtatatgagtgactaatctttgatttactaaatatggtcagctagaacagaattttccttttggttttcttgactttgattttaattaagattgtatcttagactcctgctagagctctagaagaaagttctgagaatgatgttgtgcacatgtaccctagaacttaaagtataataataataaaaaaaagaaagtaagttctaatcatttcctccaatcctttcacttgagggacagaaaccaagacttacagatgttgggtgacctggtgcctatttagtgaccaagtcagaaataacgcctaaggtcttctcaccctcgggtgtagtcatttacctaccttcagtgtgatgtactaaaatgttatccttatgtgcaccaatcaaaatttaatgttctcatcattcacatcaaaccgtgcctgagaaatatagtcactgtttttctagtatttctcaatttatttccataggctatgttcacacatatattgctcttacctctcaaatactctttctgggtttttttttaatggcccaaaatatgtcatgaagtggacattcaatgaaaaggcaaaaatattaaggtaaatttcagaatttctgaaatggaggagactagaaaaatcatccagtgcaaactttctctttgacaaatttttaaaaatgagatactaaaatataacatcatttattaacggctacacagctgtcatgtggtcaaaacaagaatgcattcatatttctcaactcccaggccaggagccctcttccagcagaatgcaggattctcttttgccagtaaccatggccactattgccttacagcttaggtccctggttctgtggctgaaattaaataatacaagtgaaatcctttttatttaaatacaaatgtttaaaaataaaggaaaatactctgcggaacctaaaacctaagttaataaaaggcttaaaagtcagccgggcatggtggctcatgcctataatcctagcactttgggaggccaagatgagcagatcataaggtcaggagatcgagaccatcctggctaatatggtgaaaccctgtctctactaaaaacacacacacacaaaaaaaattagtggggcatggtggcacgcctgtagtcccagctactctgcaggctgaagcaggagaatcactggaacctgggaggtggagcttgcagtgagccaagatcttgccactgcactccagcctgggcgacagagcgagactccatctcaaaataaataaataaataaataaataaataaataaataaataaataataaataaaaggcttaaaagtcaaatctaatgaatttattaatattttaaaaggcatatacttgaaatctatttgtttttattcctctttatataatctacttgtaggatttcaaaagaaaatcccacagtaaaatgttcattcaaataaaacatgtgagacaaggaaatgcaagctgtttaaattaaatgaaatgacctgatcatccattcaaggcaactggaagagggattagagtaaagttctatatttagttacatgttcgaagtaaatgggaaattgctgacttaataacttaagcctaaacaaaaatgaatctcagtcttctaaaaagagtccctgaaacaaaacctttaattcctagaaagcatcacagtatgaatttcagaacattgctcagggcttgtgttacataaatgtttgataaattaagaatgtattttatgcttacatgtgtcctgcttttcacagtgtctctggtcaaattaatgtaagcttttaaaatgctgcctttaattctcatgtatctaattccatccattctttatggccagttaaatgcagtatacttgtcataacacctccaaatatcaaggtctatgcatttgtctggccatttcccctgtcttccccactttcttctcaatttccagcagcatgtatcacctaggtttcttatttgagttattattctgtagacaacggcataagatatatagacatacatgatgatctatcattaaacaaaaagggaagaagagtttggagaatagaaattgtggttattgaatgacattattataagacacaaatatcttgattcggctttcattaaaatcatagtgaaatcacaggcatgtatttcagttggaagcaattaaggagtgaaagaccgttgacccaattatcttagacaatacagagtgctggattggccactacattttgctgagaaaaggaaggaaaggtaaaaatgcatacatagacttattgtaaaattaggttaaacctgctcatcataaaagattgaatctccgaatttgttttctaaactgaggaaagagctttcctgtaatattttaatagttatcttccaaaaactgttgatgtattaccctaagaccatacaactgtgttataggaatatgcactaacatttgctctaaatgtagttaaatatatgttttaataagaataaagtatataattgcatttttaaataaaatataaaccctaaaagctatcttcaggatttgaaaattgaatctatgtttcaaaaaggatactttttaaagcttacagctctcagatggttctatctctttttttcttaaaacaatttaggcatgatattgacaaaaatcttgagaaaatgacgtttttcaaagaagtatcatgaaaacttatattgaaaattttcttactaaagatacatgacagtttctaattctttcaaatgaatttctatatcataaaataaccatttactttcaagaaataaatgaattacatatgctcagaaaactcccaatgctacccacaccactatgatataaggagaaagttatgcttgttaaaataagttatgtccaaaaatatttgtcaggttgtcttgaatagctcctttgaagtacatcctttatgtcaccgccaattttctgtttctctcattaaaatataactactattatgcaaaagaagaaaacaatgaataaataaaaatgctcaaacaaaagtatccaatggttggttcacaggaaaagcaaaatatggtatctacaaggaagcagaaatttctgatttaatttgccttcacattcagtcaaccattaaagcaattggttttaatctctgtatatgggcttagtccaaaagggtttcaaaatgtggatgatgctgcatatacttgagtaactacagccaagcaacttttcaaatactcaagaatatatgtatacacatgaatatatgtatacaaaagaatatatgtatacacatgaatacctacataagaaaatatatgtatatatgtattgacacatgcatatatacatagacatgcacaaacatacacatatacagttatggttttcaatacttaaatatttatatatgcacagtaaacaagtataaaaatgattgtattctatagaagaaacacttgaagtcctgaaactaaagtattttcaaagacctaccctttctcccttcattcattctttcttttctcccttccttccctcttttcattcctttcttccctgtcatcctccctccatttttctatcaatttattccttctttccataaataattattaatcatatcacatgtgccaggaactgatatatatagaatattcagtggtaagcaatcagagaaggagccccccttcatagagctttaattgtgctgggtgtaaatccattgaaaaaaatgaaaatcatagcatttcaaatctgacagacttacattcaaatcataataacatcacttatttcacttatttgggaaataactttgctaagtttccatttgttcaaaaggaaagtggcaataattttaattccaccatttatcttgagaattaaataaaatcatgaatgaaaaaatctgatggagaatctgggacttagcaggtgttcaataaatgctacatagctactctacccatatacatttaacattaaattgcagttaaatcttagtttcaatgtcacaggttcacagatggtcaagaaaagaaaatatgctcagggtattacattgccctaaagcaaacattttactcagaaaatgtgctgaataaacactggttgaaaatatgttggtgttaccaaaaagagggagagaaaaaaaaattcagaggcaatgacacagggacttggagagacagtgtggaaaaataagcccatggtgggcttattttaataaatacagcagattaaaaggtgactggttcctcctttcttgttcatataagaggcaccattttgtaatgctggcttatagcatttccaaacccaattttattttttccatttttatgaaggaggtgttttcatttactgggaaaagagctagggcaagtaggcctccagccatggcaggtaatattctaggtttctatgaaataagttggtgcatgaaaagatagataaactcgagaaggaagtaggtctgcagggaactcaaatagcaccgtggaaacaactaacagaatggacgttctcaccaggaaatgatctgacctctatgaggacactgcatattccagaaatccaaggcatgtcctgctccatcttttatctgcttctattccccaaggaagcttttatctctgggatgggctggatgattctaaatgagatttgaaaacaatgaactccagtggaacccagcatcatctatactttaagcctcaccactacttgctataaaattccagaaactggctgaatccagtagtcttagttttaaaaaggcaattttatgaaaacaataaagcaaagacagaagcgtatttatagtgagagggagagcacttttgaaacactgggatttaaagtgtaaaatcaactcctaactgttgatatcaatgtaactgaaaaatacactaggccgggcgtggtggctcatgcctgtaatcccagcacttcgggaagccaaggcaggcagatcacaaggtcaggagttcgagaccagcctggccaacatagtgaaaccccatttctactaaaaatacaaaaattagctgggcatggtgacgcacgcctgcagtcccagctactcgggaggataaggcaggagaattgcttgaaccctggagtcagaggttgtggtgagctgaaattgcaccactgcactccagcctaggcaacagagcgagactccatctcaaaataaacaaacaaacaaacaaaaacaaacaaaaaatactagaaaaaatgtttcttctccataaataaaaaactcaagtaccaaattgaaacagcgttattgtacctaatgaaaagggtactgaataaaagtcagatttctgtacagagctatgcgaaaatgacacttccaatgtttttgttgtccaaccatgcattacatagagagagggtccccaaaactaataggatcccttactgagaaagtctcctttgcagatggatgtgttaaatagtctgggcttattgtccctaagtattaaaataagcaattatttccaatcagacaggttctatattttccaagcaaccttcctgattgcgatttagctccctacatggattttccattgtgattaaaggagacctctgattcactttacaatcatatttctcattgcaaagtagaaagctggcattttacttcacgttcctcagtcttttatgagttttctaagtatgaatcagcatttcaagttccaattacttgtgacaatgaaaagatggagttactaaaacatgtgagatttagggccaaccagatgtactggtaaatttggtcaagttaatggtatgtatatgcaaatcattcctcaaagcatggcagacatagagaaatacaacaagacttagtctcacttctcaaggagtttccaaaccagatgaggaggtaagttatatgtacatgggaaaatagaaaaagacatgaaggcagtttgaggcccagcagaatagggagatttataagatacataaatatattaagagcatacacatacacctacaatgaaaagattagaaggatatctcggggtagtgggatagatatgcctttattgcatttatattttctataatacacacgcatttgcttttataataaaaacacttaaaatgttatctgtagagtgtaataggctaccataggctggagcagaaatatctacattcggatttaccgtggatctgtagagatataatcagtggtcaccaagattaagttaccatcaaaaatacttctattagtttcctattgctactgtaatgaattatcacaaacttggtgggttggtttaaaacagcctaaacttattttctcacaggtctggagttcagaagtacaaaatcggtctaattgggataaaatcaaggtgttggcagggttgcattccttctggagggttcggagaaaatctgacttcttgcttttcccagcctctagaggccacccacattccttggctcatggcccctgttcatcctcaaaaccagcaatgtctggtatagtcttcatcacactatgtcactgggacattgacacttttgtctcttttttttttttttaacttatagagaatcttgtgattacatcaggctcacccaggaagtatggagaaatgatcaaggatccataacttaattacatcttcaaaatcttttaccatgtacagtaatatattcataggatccaggaattaggacatgggcatttttgtaagtagattattttaaataccaaaataatatttaagaaataaacacattccttgacacaattccttttttttgtagggggaggggggagatgcatactttctctttttctccatatatcacttttaaaaatattataattcaacttgagtggtctaagaaaatcagcaatatcaaatttgtaactcaccaccaagataacaagagagaagatgcaaaggttattttctgcaaattacacagctttcttcttagctataggagcatcctagatgagaaattatgctcttcatccatagttaatggaattttgaaaatgggaggaggcattgccatgggacttgatgttataaagtaatgctttgcctgattactccagaggctagatctgctaaagctacagcagaagtaaatccacggaacagaaaatctagattataaccttcctgacaatcaaatattggagaagaattctaccaagctcaactgctatttaatgagctactactgcaatgtcaaatgatgtaaggttaaggactggcttttctaataaacattttgcagacctattaatattgaagttgttgttatctcctcataaatctaaccatgaccacaatctatacagtgaggacttggtctttgctcatgattcaccctctgcctacaaccccttggtgaatatttgcacaacttccaaaacttagcaaagtcaccctcttgcccttccagtgaagtcctttgtctctgtattactcactctcatctcaaataacattgacccctgcctccctggaattccactggacatacttacaacttttgtgacctttgtctttgcatggtctacatccccacattaatatccagaggtgagaattggtttgacttatttcaaccattttaaagataaccataaggccaggaaaaagtttacagtctgatagagctatcccacttgctcaaatatttaaatgcttcaatgaacacctgcttccctgagctttctcctgggactctcaacccagcaactaaagtggtgatgcctgggccatccaggagcctctgggaccctgctatagaaccacagccaaggtcacttctaattggtcagtgtccaggctccacaaacttgactgcattcccaaactgcaggacagtaactggcttataatgggcactcagtaaatatctgttgaatgaatgcatcttatcaacataccttgtaagtcaatatattttgctacaaaaaaactaaaaacaaaacacgttcctcacaatttcacagaaggtcattcaaatctttatttaaagtagtttgcaaactatattttctactattttgcaccgacctaccgtggttcaacttgggagacattccagaatggctagataattttatctcacaagtgaaaacagttttatgttttaaaaagaacactaccagcaaagaaacaaaaaacagtgccttgcagagatggcatttttgattgacccaacagcaaaactaaattaaataagcatagagctatggaaaagacagacatgtctaaataggttctagaaagatctcccaagaaataaagtagaaatctttgataaaaagttccacaaaggaagactttaagcattttaagcagaagaatcacaagtgaaaacaagaaaaaacagaggaaaatgttgctttcatcttgcaagacaagtgtccttcacttgaaataagattaccgtagaatttcaaagacgtttagcagatttcagaaagtagtagctactctttatctttaggttctttgccttaataactgtgatatttatgaaatagaagatttgttttaagtgaggttattgttccatttagacaatgaacattttcaaaagaatgtaatagccatagaaaatatcttacatgagacagttcagggcataaaaatcttaaattaaagaaagctttactctgtaaatttaaaattcacctacttttgtgagtctgtactctcaaacttggaaaatagttatattatacaggtccacatcaaaccacagaaacacaaaaattaaactgacaatgtatcaaaactcttgaggaaaaaggactttctaagctttgaagtactatgaaaacaaaagcacacaggaaaagatgaataattgtggaacgatagtaaacatatacatgctttatgctaaaaaaataagaaaatattcaaaagacaaataaccactttgcaacaaatgtaagaagcaaacaataagtatgtttaatataacaagagcatgtatagattactaagaaaagccataagaccctaataaataaataggtaaaaaacagtgtttttgtttgctatgatgccataacaaaatacaacagactgaggggcttacacaatagaaatatattttctcgcagatctggaggctagatgtcctagattaagatattagcgggtttggtttcttcagaggcctctctccttggtttgcaaatggccacattcttgctctgtccccacatagctgtcctcagtctttgtgttgtctgtgtcctaatttcctcctcttataggacaccagtcatattggattagggcccatccatagaacctcattttatcttaattacttacttaaagccctatcttcaaatatagtatcatgctgaggtttaggtgttcaacatatgtattgaggtgggaagcacaatttatcccataacaaaccataaacaattcaaaacagaaatgtctgaaacaggcacataaaaatattacatttgctaataagtaaaggaatgctaattgaaggtaaaatatcattatatttttcattttcaaactagtaagacttgaaagtcttttaaaagcattttaatcctggcaaggtttcagttcaatgagaactttgaatgctattggcaggagtgtaatctgacaaaccattttgggaaggaaactttcaatattaatcaagattataaaaaatattatactcagtataggtcaatataatcaagaaaaaataaaaaaaaaagcacatttagatatgagcatattaacttctaggaagatatctttactaaaatattatctgagtcttattcataataccaaaaaaaaaattgaaccaatctaagggctcacaatggagaaactctaatgtaaactcaacacttcataagctgttatgcagacattaaaacggtgtgagtaataactatcaaaaacataaaatagttacaattttgttttataaaatgcagtatgcaaagctatatattaaaaagattcacagaataaaaggagcaggaaatatacccacagtcatttctttaagataacacaattgtttgttgttatttgtttctatttactggtattgcagttttaaaatttccaaaaagcaatatgcattcgtgtttataataaaaacataatcatttcaacttgagttaaattggattgaatatgccaaaatttagtttcaattctattaagcgtagctcaacaggtcagcttcttactttaatgctttgctttcactctgccacatggtttttaaccaacttttatgttgacataagtgataccttcactcaacacccatttcaaacccaacccatttatgccccagaaataaaaacagatcactctatgggaaaagatggagatccctatcataagaacttgagaatccttagcaggtcaagttcccctttcaggaaaccctggtaagatcattctctgttcagcttttctacctgagatcatccactttatctgctgaaaggtcagaggcatgcgttctgtagacgcctcaataacatgagacactacctttctgctgcctttctctgtgactgtgagagaaatatacagcaaggtgtggcaagttctaacacaagcatctcaactcttagttcagtgcaggttatagagtactgtgccagaagaacctgtgaaatattgtattttactttttggtaaaataccaagattcaaagtacactcaatcttggagtttgtgaggagctccaaattgtaaactttgagcaactgattgccaatcaaaactacaggactcaaactatgttcattaatttgatggatcttaattgggactcttattttcctactagactagaaaggagaaacataattgtaaagagttgcatagtgtctcaccaaaactcacacccacctggaatctcagaatgtaaccgtatttggaaatgtggtctttccaaatataactaaggtaaagatcaaggtgaactcatactggattagggtaggctctaaatgcaatgaaagtgtttttacaagacgcaaaaaaggacacacagagaagaagccatgtggagtcagaggctaaggtgagagcaaggctgccacaagccaaggaacatcaggagccaccagaagctggaagaggaaggaaagattctttagagtcttcagagagaccctgaccctgctgactcttgactttggatgtctaatctggagaactgtgagagcataaatttctgttgttttaagtaacctagtttgtgatgatttgttatgacagccctgggaaattaatacaatgctatatgaagacaatgatgccacatttcacaaaactgtccctttatattgaggcagaagggtgtggtggaaacagcaccaaaagagcagagtcaaagggttgggtattggctccatgctacaactttccactaggcaaaacagagcctctccaaatagctgcttgtgatagacatgattatctcaattgcataggattgttaacaagacaaaggaaatggtatacctaataagcatttgataaggtgtagacagaaatcctgattttgttgttattgtcagtggtttagagtaaatgccaattttgcactaaatatctatttaggaaatatgaaaacagaccaaaaaatatttacacaacaagtacatatgtggtttacctttcagttctttattataggagctttcttgcctaaagggtgggtttatatcatgaagaccgaatttataccctgttgtgaatcatttatcacacaggtgaattattagggatgttttggaaggggtgtaatctgaggctgttatttttaggattgttgtactgtcattaataatcatctcttgtacttgtagtcatctgaactggcaaagaaaagaaatagatagcccggatcatggtaaggcagctttttagtgtttctgattgaaaaaaataaaaagttagggacaaagaatcctgtcactaatgtccagttcctgggttttgatggcattcaccatccaatttgagaaaaatggtagatgggtggcatcaaaggcaagaaaactgactgctgttatgtaagtaataaccacagtacaatactgcttttataacattccaggctgtaataactactagaataaattactcaattcttaaagtaacagcttaggtgtaccattcagaatattaaatgtataactcttgattgtgaatccccttattcaataaaaatataatgtggcaaattgtttcaagcattatttctaagaattgatgttatccaaacatgtcttcaaaattaaatagaagaagggttgaaggcttctggtgttcatgctttcctccctattagagcagaaggcaagtctccaagctcattctcaatggaaaattgatgccaaacctaaggtgttgttgtgaacaaaactcactgcagcaaacaatttctccaaagctcaactccctaggagcattttgtcaatgttgggtaattagtttccacgatgatcgctgtctttcagtgggtctacctagacggttacattgttctccagtcttcttttgtgttccaatgaaggaccaatgtggcaagtgccaattcctcactgctttgccctctccccacttgacaccattcccagacatgcagatagtggtgatggtggaaaaatattcaccgccctaggaatttctctctaaccccattcataagttcatatccccacccaatcctggatgagtcattgcaatattcagctaatgagacccgtcattcttggacctgtgcttaccctacatccacatctcccatcactgccctccacatgtgctatactgccgtcacactgagggtcagggccctttcactcttccacatctttgggtagaaagaacagcagggcatgcctgtttggagcacacatgccggagatccttgcctaaacaccctcatgctgagttccttgctcttctctttgcttctttttactatgtctcatcactatatattccatacttagagtctaagttacttaattccaggctgaggctggagctatacagtagttaccacttatctgcaattttgctttccgtggttccagttaccagctgtcaatggtggtctgaaaatattaaatagaaaattccagaaataaaccatttgtaagttttatatcacacgcccttcagagtggaatgatgaaatcttgtgcccatcctcctccctctctccagggatatgaatcctccttttgtcctgggtttccacattgtagacgctgcctgcccatgaatcactttgtagccactggtgatcagatctactgtctcagtattacagggcttatgttcaagaaaccctttattttatttagcagtggcccaaagcacaagagtagtgatgctggcatttcaaacatgccaaaaagaagctgtaaaatgcttccttaaagtgaaaaggtaaaagttctaaacttaataaagaacacaaaaacttatgctgaggtagctaaagtctacggtaagaacacatcttctatccacgaaactggagtgacaccagcatttccagttccctcaaatatgcctccgcagctctaggtctgatgctaggttgggaatgagggtgtagtgattgagcttgatgatggtttgactaacaagtaaatgaaacatgaacatcctttgaggaaagtggctaattataaacatattttgaaaacaagtgctaccatttattcagcatttactaggaccaagaattaagtagtttttatatatatcatcctaatctaattctaggcacctgtaagttcaaaccatgtgattgccctgagaagactaataatctattgcccttacaaactgtattttccaggtgctcaacagttatttcgcggagaagctgtgggctggagaatgggaaggtggagaaggtaggctactaatgtgagcattccatttctcctacatggcttcaaacaattcagccctggccccaaacacacaactccattaggcaacataaaagccctacagttaagtgggtttgccgcacctcctagctagataagactgcaatcatctatatttacttaagactgtccatttgtaggaagtagggggtcctactgtaggacgtagggggtgtcttgattatttaggccttgcaaaaaatgaattgagcctgatctcatggaaattctacagaggtaggtagggaagaggagactgggtgaagacatctggaggaagctctcagccaaatccaaagaccaaacatcccctttctcaaacaaatcaatgacttgaataaaaaggaggcagagctagtgttacacatttaaagagacttggaaaacataacagcaaataccatataaagactttgtttggattgtatgcaaacaaacacacaattaaaaaacttcttgagacaattgaggcaatgcaaatatggatatatgaactgaatcttaaattgcattaaaggattattattaattgtgttaggtgttatgacatggtgtttatgtatatacacattcttatcatttggacatgtatattcaagaatctgcaggagaaaagcattatgtctaatattcattttaaaatatgacctcctcaaataaattaatggatggaacaagatttgaaaattgctgacaattgttgaagctaggtaaagggtgcataagctctattgtactattcagtttcttttgtttgcgtttgaaattttcataataacaagctttacaaaaagcaaatgcattgattctttttatctcaaaaagagacatttgtgcctgccaggtaatgtgtccaagttttagaaatgtaactggaatgctcagatcaatttacatttatatgaaatcacaactgggttgaacacaggtagagaaaaggcaagcagagccaagaagaaaaggcttagggaggatgagtattaaaacaacatctgatggaacaatcaataattatgtgcatagccacaatatgaaagaagtgaatgaactccaaggaaaagaagttcaaataaaaaggtagcaaaactaatagaaactgtctttctactgttctgcaggtggtataaacaccctcctccttcaagacgcatcaaaagttatagatcagcgctgccttttccagctccccaaggctgttagctgctctctcatatgagattccacaaagctttgttcatacttttctgtttttctccactttataagggaagagatgttgactagcacctgccttggaaggtgatatatgtatacgcttaagaaatagtggaaggaatggatgcatggtctatttgtccattttcacactgctataaagaaatatcagagactgggtaatttataaaagaaaaaggtttaattgactcacatttctgcatggctgaggggggcgcctcaggaaacttacaatcatggtgaaaggcaaagggcaagcaagcttgtaccttctcacatgtcagtaggaaagagagagtgagcaagcaaagggggaagagccccttgtaaaaccatcagatctcatgagagctcacttcactaccaggagaacagcatggggcacactacccccgtaatccaaccacctcccaccaggtctctccctcaacacctggggattccaattccagatgagattttggtgggaacacaaagcctaaccatatcacatgggtactagaggaagaaaaaaaagggagggatggaagacaaagaaaaattctattctttcctgggaagaaaaattctgaggtcagagggttgggactgatatttaagaaagacttcctgtaaataatcccaaaccaagtagaatcagatgctgcctttctttaggagcctgctactaggattttgttttgttttgttatagctaggctaaatcccacccattctcttttgtgcaagcaattcaccaaatatgccaggctggagacagttgagattttttatctcttgctgagaaaagaaatttttcattgagctatcacatgcacagttatttttatttgactctcagttgagatacccctgctgcatagcatattgaatactttattgaccataaaatgtgctgctgcaattagagggtttttttttatctttttttccaagcattgtgcctttctgggggcacttggaagctcatttctgtttatcagtttttcaaggatgtttgcaatttagcaacagtgaattggaagttcagttaaatatctggcatgtttgagtgagtgtttccaagatctgcaattaagcagggcagggtaaagtgtagtgaggctcctcatgcataatctgcaaaggtttttcacactatctgaggtcttagagaaaaaaaatgttcactaagtaaatcaggagcaaattcacttaagagactgctttgtaaatcattcagctttgtcaggcaatctctgggtgcactaagtgctggctatctttgggctattttagaggccatcacctctattgggtatcaccaagtaaaacagcacagacctcatggaagataccatgtttaaatagcatgagttttcagatctcatgcctcaggcagagtttggaaccaggagctgaggacactattagttgaatgaatgaataaaagaaaagagaattcttcctggtctctaaaaaaatatgccctaggttacttccagtaagccaacagcaaatcagaatggaatgtgtgagttgcagcaggactggcagctcatgcaggttaaatgtcctgttgtgcatttccctccatgtaccctcactgggttagtagggaagcccggactcgtcttcgaatctcaagccatgacctgtgctatttctgtagatttcatagctgctgtcaagaaaactttttattgaagcatcatgccttttgtgaaactatagtcaagcccatgcccaaaagccatctaggtctagacctctgatgacattctgatgaggtggagcaggtgactgctaccgtggagattcctgttccactctcagcttcttctctccatctactgaccccctcctcctactatccccaccaggaaatagacagactccaagagctacagcttagttgtactgagaacctaacaggcattgtgcatgcttgtgatgcaccaacgaatgagacagaagtgtgccctccttagggagctcgaattctagtgatttaaaataagcctgcagtaagggctcgcatctctccacagcagccatcttacaaagcattgtaccttcaatttggttttctgtgtcgtttttttcttaattcgctcaataaaatttatttcaggtttctgctcaactgtcactttacaatggaaagttctccttctaaaaaatatccatctccaactaccaccactccacacccacctctctctaccttgctttatttgtctatacagcccttaccactaccggaccaagcttatttatttattagtttttctgtgtgtttttccttgctagaatataaagtgtttcagggcagccaacttggttaattcattgctgagtatctggcttattataggagatgaatacatatttgttgaattaattaatgcataaataaccataagcaataggtatgaccattattcctgtttttcaaatgggaaattcacacttaaggaggataagaaatttgcctaaagtcacccaatacataagcagtgaaactagggctcagaccaggtcttctggagcagaaagcctggcctcttgatcattactctaaattgtcccacttcaaataatcatttctttaacatgtctaatagtagaagcttccctaaactgtcaactctaggatgggatgaagacactgaatagaagaaatgccactaaacaacatataaagataaaaatacaaaactacaaacgtaattctgaaaaacttcagaataaaatttaggacagttttatcttgtgcagagttaacataaaaatatgtgcttttgggccgggcacagtggctcatatctgtaatccagcatttttggaggccgaggtgggcggatcacctgaggtcaggagttcaagaccaccctggccaacatggagaaaccctgtctctactaaaaatacaaaaattagccaggcatggtcatgtgtgcctgtaatcccagctactcgggaggctgaggcaggagaattgcttgcttgaatcccagaggcagaggtagcagatggcgccacttcactccagtggagacagagcaagacaccgtctcaaaaagaaatagaaagaaagaacatggaaagaataaaagctttagagtcgagcatggataggctgtctctgccagtagttattcattcaccttctcaacctcaactttcatatctataaggtagggctgaggcctacccaccaaggtggttggcagaaggaaattagataataaatgtaacgtttctggcaaaactttaagttaaatgaatgactcatttagttacttactctaataagtcctaagcaaatggacaaataaaattaggtttcagttatgcatctattaatgcctaaaaacagcagcgctgcacatcacaaaggaacaggcagacttacccccggggcaactgaaactgaaggacaaggggctagtgacagtcaggaacaatggtccctaatcccagggaagatgtattaaatgtgtttacttgctgttgctcataccaatcaattgatcaggctgtggaaggaggtatagtggcacccatacatttatttagacataactaatggacttcccaagcatggatagagaagccacttaactggtcaaatatctggaagaaaaaaaacctgtagttaatcaaatatctttaataaaagtattggtaacattctgcccatattcatcaaacacttggtattaatattgttttcaaaaaaaagtgactgatgttctagctcagatgtggtcttacatatttagtttgtcacaatttctatagttgctgatagggcagtaatgatcttttcttgtgttatggttgtattgatataataaattgcattttcccttagattttattagaaactataaatggctctatcacctctgaaacaacataagtcacgcaacacatttttaattttatcagcccaactccttttttagaatcagaatatttgcttgaaaactgaaaagttttagtctccctaaagaaatatcaactgatactttatagctaaaaacatggatttttatttctctttttctttcccaattcctaaagaaatgcagatacatttctccttgttctatttggccagtttagatctttagatggttttagtcttcgtatgtttgtttacgtgctggttttaaaatagttgaagtattataagaaatatctgttggccgggcacagtggcttacgcctgtaatcccaccactttgggaggctgaggcgggcaggtcacgaggtcatgagacagagtccagcctggccaacatgatgaaaccccatgtctactaaaaatacaaaaattatccgggtatggtggtgtgtgcctgtaatctcagctactctggaggctgaggtacgagaattgcttgaacccaggaggcggaggttgcagtgagccaagattgcaccactgcactccagcctggcgacagagcaagactctgtctcaaaaaaaaaaaaaaaaagagagagagagagaaatatctatcaactgcagcctctctctttctcagatggaagaagtccaaatgtatattagcttagtaactatgtaaccactttaaaaggggcacaaatctaccttgatatctctgaattacttctgaaattatttatcctgaaagaaaaatcaatgaacactcctgaaatttgccacttgtcatttcatgatattgaaaagcaaatgtaaaactcgcttttagagaaaataggccaggcgcagtggctcacgcctgtaatcccagcactttgggaagctgaggtaggcagatctcttgaggacagaagttcaagaccagcctggccatgatgtgaaatccctatctccactaaaaatacaaaaattagccaggtgtggtagcaggcacctgtaatcacagctacttgggaggctgaggcagcagaatcgcttgaacctgggaggtggaggttgcagtgagctgagatccagccagccactgcactccagcctgagcaacagagtcctgtctcaaaaaaagaaagaaagaaagaaagaaagaaagaaagaaagaaagaaagaaagaaagaaagaaagaaagaaagaaggaaggaaggaaggaaggaaggaaggaaggaaagaaagaaagaaagaaagaaagaaagaaagaaagaaagaaagaaagaaaagaaaagaaaagaaaagaaaagaaaagaaaagaaaagagaaaagaaaagaaaagagaaaagaaagaaagaaactatcataaaatcattcaggatacctctttgtgtgggttagatctctgacaacagagaacgtaagctcacatgtgggtttggactaaataatgatcaagtatctatgttcagatattatctgtcccaagagagcacttagcaaaagaatcacaatatttatcatgatgtaatgcctcctctctatatgcaatttgaaaatgctggttaggaaatacatggctgagaatgctatttttcttttttagagacgtcttcaccatttattacagattgagccagagacttggaatcaacagtcctgagtttatattctggctttaccaatttctagcaacaaaaatatcatttatttgaacttccttttttgcccttgtaaagtagaactggtgatgcctgccacccaatctatgaccccattcaataagtgttcattgaatttaaatcttgtctacaaagttagcgatgaagccacataaatgacgtcttgggaaaatcaaccaatgaaaagatagaactgttcagaactttttgtagccacaggtgagctgagtattgggtgtaagagtatagtccatgcagatgaaaagacatgcgttggtgtgtgactcctaactactaggtttgtgtccttatgcaagtaatttgaccttagtatgccttatttttcacatctgcaaaatgggtatgacaataagaccaactccctaattttactgtaagaaataaatttagaaaatgcatacttactgcaaagaaaggaacacaggaaaccagtcaataaaaattgttgctattgatatttataataaaaacaataagcgaaatcattcattcaattaaagttttggggtgcaatttgtgtcctatatactgttctaggtactggggatacagaggtgaataaaaccaacaacctctctgttctcatgaaactatgtctggtaaagaatagacaaggcaatgtcaatgctctgaagacaataaaacaaaataatgtgaatagagtaactgaagatgtgtgtatggttttgtgggagagtgcatgtttggaaagtgccttaaaaacagggtgacccccacatgtctctttgaggaagtaaggtttgagcttcgacctgcaccctgtgcagactttctgcaggactttggcacatgcttactcaagatgcattttcacttcctgcaatccatcatttctctaaacccatgtaataaatgggattcagattttaataggcatactttgttctttgtaacaaaagggacatccacagttgcataagtggtgaatccatcttggtctttggaattagagattcccagccataagacttattgggtgggtgatagtggactcattatctaggcaccctaagccttacttatcccatctgtaaaacagccatgaaacaaagccatatatgggctgcttctgccagagtctgtgatgcagaagagaacctccaaatggtaattattgtcactatcagcagtagagaaatatcctggttaaaacctccactgcccacttgcaatgtgaccttgggtaagatgtgtgacttctctgagcctcagtgtactaatgtgtaagataaggataataataacaataataataataataatacctacttatcaagtttgtgtgagaaattaactgagttgtagaaaccactttgaatgggttctggcaaagagcaaactcaataagtgctccttgttagtattactcatgacattgacatcatgaattactactcacaggctcatagaccactgtgagagaaaagatcattgacttagaaatatgttgaactaagctgttcccatgaaaatcttccctaatagaacaattatgtgaaccattttttatcttctggagattttaatatattgattaaatgtgtcaacacagtgatatgatcagtgaataggaacacttgctttgtataattttgcccattttgattgctcttttaatttatgcatttcttaaaattgagttcaattatcaccacatgcctcttcaatcaacattggctgcatttcatgtgtccttaacaaatcacaaaagtaatttgaacttattgccaagtgaaaaagaaatgaacatcttcaactgaatattcttggttttaccatatagcaggacatagaaatctttgtagtcaaagaatcctagaacctaagaacagtaatcatgctacttttcatagacatcagaaattgatcaggacattttttattctttaactgaccctgaatatgtctttgaccctgagatctgggaagtcatttctatactgaggtgtggaagaggagacctattaacctggtatcagcttctcaattccgacctgacttcagggcagtctgaagtcttcataaatttattttgctgaggtcacacagcagtagacctggaatgacaacctacgttccaaaattctcatggccattatcttgccacctgtccttgtaaactgctattaaattcctgtctaaacatggctgtggatacaggaggaacggaattataacacaagtcaaagtcctcatttttcacctctgcttgaatttaatatactgctcctttagatttctgctctcaatgtctttgctcttctttctattttcattgacataaatattctgttatagctaactgataaagaaagaactacaggtctccaactactctattcagctgctctcatattcaagaacagcatcctacaaatagaaatattgaatataaatatgaacaatgatgttctcacccataatgttgccgtgcagctcaattactcatggttttctttgctgaaaacttatctcccttgctactccttcccctcaaagcttcctttcttaacatttaacttccagagcctaaacttaactaagctcaggtactagaatctagtggttccatgaatgactgcaaatcttgagtgctctgctgatgctaataataaagcatgtcagcacaagaaaaaccctggtaataaccatgccaagaaaatgagggaaaacgcccaatcccacgcctacaaattcatgctgctaattattaacaatgaaaaacttggcttaaattcaaccttcaattagatacatgttcatgtttttattaaagtaaaattctaaatttgttcaataaaacaggcaaattatgggttttagagactgactttattaaaatatttgtgttctattggcagcatggcaatgtgaaatgcagaattcggaaccccagggcctgacttctaggccttttctgaatcaatctgaatacacaagtagctccatggctgttttctcctctgtaaatcaagtacataatcaattacagaggattagaaatcctctctaaatttctgtcaagtattaaaaagctaaaattttaaatatttctattatttatagctttgcaaagcaaacaaattgcttaagggtagccacagaatggtcatggatgccatttccactattttccatccacactcccaatgcattctatagcaagaccagcatggaatgaccaaaacatatcttaataagctaagtgtattcatttaacagatattcattcaccaactactacatggcaggcactgttctaggtgcttatgagtctgatattttgctcatatgagaaagaacttataaatctcataaaattaaataacgttttgcacttgtaaaaactgactataagaataggttgaaaggagagtgtgtacctctcctttaattatgtactttattaagaacatcctctaataattttttgagagatgagtctcactctgttgcccaggctggagtgctgtagcatgatcataactcactatagcctcaaactcctgagttcaagtgatccacctgccacagcttctcaagtagctggtactacaagacctatctataaccttttcaacaatataacttctaaattgaaccctggtggttactaaggtgtgatagacagtccttctttgtgtacttttttgtaaatgcccatctgaggcctgtttgatgaagaaattcaaataatctaaaatttggagaaaaaataatgaattatttgtaattattcaaaatttgattaaatctataaggccagtagcagagaaaaataacatattcactcagttgaacactatacagacattacaatgacctctctctcttttttttacaaccatcttataactaaatttaaaacatacaattcttatgttcacataaaaataattaaaatgcaatatataatattaacataaatttgtaaaacaagtacaaaaaagcaaaaaaaaactctcaaaataaatataccacaatattaaaagtgtttcttataacaaaattaatttttaattatttcttccatatttattttttccaaatttactcctatagaggaagagaggggaaaattgtattgtttaacaacattaaaaaaaaattccttactttgcaaattgcaaatgacctaaatgtctaaatggctaaatgatgcggaacaggaagtcctagttatacacacaactcaacacttccatgatgggataattatgataacatccaaggtggctatacaaatatcatgatttgagaaaaatatttaatgaaataattttaaatgtgaaaaatcatattataaatcactatacactatattatcatataatccccaatatgactagtggaaatattacaatgacactttctaacaaaaatataatatgtgccacatatgtaattttatttttctagtagccacattttaaaaagtaatatgtgccacatatataattttatttttcaattagccacattttataaagtaaaaagaaacaggtgaaattaaatttaataatatattcaactcaatatattcaaaatattatttcaacatgcaatcaacataaaaaattattcatgatctacttcacattattattttaccacacatcccaatttggaccagttacatttcaggtgctcgttagccatatgtggcttgtgactaccctaaaggacagcattgcattgaaatgaaacaaagaagattagaaattgttgtcttttctcattatgtttttcccatttcttatgtgcaagtttccttattttatattttccccattgcctagtacactgctaggctcaataaatctgggctgcctttaacttataaaatactaacaaaattaattttgagcagaactggttgctgttagttagacgaatctcaggaaaaaagccaagggtactgttcctcatctgcaaacataaaacaaaccagcaaggacaccactcttattttattctttagtgttaaagccaaccatcataaccaaagatggcatctacaagacaacatttaaacactttaccagcgtcattagtgggctgggtcaacgagactcttccacgagtcatcaaaaccatcttccagtcatgactcttctttatctgaataaatgttcacatgaagaatgtgtatatataagtgtgagaaaggaaaggagaatcccagaagattgggaggggggtgtaggtggatggaattggagggaaggactcacatgatgatctgacaggtgctcccacttccgaagtctccctctgggaccactgggtgtaagtcttcttgtcaaggacagcacttggtacacagcgaatgctcaataaccgcttctagattgaatggacatatgcacagtttgcctaatttcctcgtcaggacactcaggaatgcattcctaacaacgagcacaggttcaccagacaataattccttcactgtggttgaattcacacaaacaaaatgtgaagaacattgcccagattatcattttaaatatagctgcagtctgcgtgtcataagaaacaaagcccacggctgtgcattcctctaacacaataggcacatgccatccggtgcttattacacacaaggtgctggtgattatggttatatacatagagacaaaacgggcaactagcttagcctagttataactaacaaatacacttggctttatctctttccataatgaaggtttaatcattcctttctttttcttttactgaataaaaagaactggatagaattttgaacatgattctactggctaataaaaacaacaatgtcttcagaagtgtggagaaaagccttagctagtattaaagggtaaatgtgccattctagagtgtcttctgagagccagggcattagctggcaatggtaggtatataatagcttgggtctgtcccctgagctggttaaccttgagcaagttatttctcttttctgaatctcaactttctcagcaaaaggaaataaagaaaacccagcacagttattctgaggattaaataacataagtagaatgcttcttccactgtatatgctaaatttttcatttcagtcttgttatatacatcttcctttttgttgaaaaatgaatgtgacaaaagcaagaaaaacaatcactgatttatctgaaattgtaaaaattctcaggtttgcttgttatgctttgaaaaaggaaccctcagccaacacacagaatttggaagcagcctgggagttttaataggtttgctaggaaatgggtttcagtgccaggaactccagatcacaagaaaatttatgcaattagatcatttggtctaaatgtgattatgtattttagtaatgaacagtatggtaaagccagaacaatagaaggaaagcagtaagaagaaattcaatttagtatagaagcttcagagacctgcagaaagggaaatcatatatgcatgataagcaggcattttccataatggctggagataacaagtaaatgatttcagacaattgcgtggaggatacagagggtacagactggcaattctcagaatgtggccataacaccagccagggagacaaactttgaagttcagaacagaaaaggtaaagatgttagaggtggtagtactgagtcagtgccaattaatgtgcaaagtttgcaactcagaagagaaataagaaaagtccaaccagaaagttcataaatgagctagttcaacttggagagaaagtggaagaagagtgagccttgggctatatcatgacactggggcatttgttttcaatgaaatatttatataaaaatgaaacaaggtgtgtcatattggtacccatagttggtgatgattaattatgtctggtcaggatcagaaaccggactatataaaccactgccagctaatgcatgtctcccagaagacatgagagggtggtgatggctttgctctttaatactggacttttgctccacatccctggaaggaatgggccatagggaggcttagaaatcttttctgccctttccaccaagggctcagatgagagcaagactaagggacctacttccctgtccttttttgcttgtctgctatcctttgtgctccttaggactgggaagtcctcaggcctcctccaacccccagactagctggaggggagatgtggagtgtacaggcattgaagagaggtgtttgaagagtcaggagaagaagattttccatggaagttcaattcataagccctttgctcttctcattaaaagctgtgtattggaggagaggctctatgagacccatatcacagccatgtcaacttgggatggagcctagtgtttcctccccaaattaaattgagctactctcagggagtatacactgtggctacaacagtcaaataataataatattagtacgaatttaaaatgggaagtgcaatggctttttgtcattgttttattatgaagagaacctttttttttttttccgagacagagtcttgctctgtcacccaggctggaatggagtgatgcgatctcagcttactgcaacctcgacctccggggctcaagtgatcctcccatctcagcatcccaagtatctagggcagaatctaatcctttttgttttattgggccactggagtggtcttattaactatgttaatggtacccactgctccaggagaaggcaatggtaaatgactgtgtgtgtgagcgtgtgtaactgtgtgcgcatgtgtccatgttgcttaacaaaaactgttttatcccttttttatgcagacttgctccctgggggaaaagtggtcaatttctgagttaggggctgtttgaaagagaggaattgttcccctggagggacatggaatcaggatggtgacttgagcttaaagatggactctggggtcagaaacagggctccgtcttctttttcttttcttttttttcttgtgttaatacatataaatgggtcttgttttattgctcagactggtcttgacctcctgacctcatgtgatcctcccatctcagcctccctagtagctgggattacagatgcaagccacctgcctggctgagggttccttccacagaatccctcaggacccagagatcttagcaccaggccgtgaaaaaaaaaaaaaaaaaaaacaaactgaagatgtgtatgtgaggacagaaagagagagacagatcaaggaatcccagagcccaagagcaaagatacttaggaaaaggcatacagtaaactaagcggccattagattagaaaggagccatctgcaatagcggcaccatgtggtaataatgtgtcatagcagcagtggaccaggattgtagatttctcttcccttggcttttaaaacacctgattaacgctctctgagtcagggctcttgaattacacaggaatgcagaagaaggtggaagaataggaaaactcagatgtcttcctgctaacggagcaggtggtggcctgaacaatacattatttaacaaatgtgagaaagtaattattggggttctacaaggtttattctaggccatcctattttccataagaaggtagcactgcacttggcgtataccgatctcatttactatctcaataataacccttgagacagtttcccttacccactttatgcaagaataactaagggtcagagagttcaaataatttgcacaaggattactcgattgtaagagtttgagctgggactcacatgcaagttcatttgtcttcaaaatcctgggcttccaatctctgttccccttgcctccccacagtcttaaaataaatgtttcccaggcttccctctgctgctatcactgttggcataaagcgaatttcctcgactggtgaacctaaaattttctaacaacaatgatctgcataatttctcatagtttaaaaagttcttatgaaaacaatttccttttcagtcttcccacaatttcataaggtaggtaaaataaagattattattatcatctcattttatatacgaggcagggagggccctaattaatgtacttatttcaaagtctggcatctcttaacaataaacttatttcactctttgttaaactgaccagcatagtcatggactgagagtcagaaagtgtgtgttttatttattcattcattcacttgtgtaattacaaatccattgagtgtctatcacctatcaggcattattttaggtactgaaatatagcagtgatcacaacaaagaccctgtcctcttggggaatgcattctagtgaaagaaacagaaaatgcacaaggaaacaatgatttgagatcaagtgtcaggtagtgatcatggcaatgaagaaaaacaaagagaacacaagaaagggagtcagggaatctctctttgcagagcaacatctgagaagaggtgaggaagagaactagggagaagacttaatgcattaaagctttagaaaggaatttgctttatgaaagaatgagaaggccattataactggagcccaacgagcaaggactagtgataccagaagacactggaggaggagacagtcagatcacacagagcttgaaatgccttgttgagagtgagggagacttattgcaagaatgatgggaatctatgtgggggttcagagcagggtggggcagagctgatacatgtttaaaggatacttccatggctctgtggaaacttgactcagggatgtggggtggggaggcagtgcagagagaaatcaaggagatggggttaggaagcagatggagtgacaggtgagagaggtcgatggctaagaatagaatggtaacggcagctggctttattgccaattatgcaatacttttaggttctatgaccttgagtttaattaacctctttggggttaattagctttttttagcttatttttatttcaaaatacagttattaaaatccttacaagtctgtaatgaaagaaaacttacaaaaaattacatatcctgaaatatataaaacgttaaataactgtttttctcttgccatagagaaaaatatacacagcggggacctaataagcacagaatttgattcagaaatggatttaaaacatacacactactacctgaaagcaagcatcaaatagttgtaagtgccaaagcaaccaaacttaccaccgacatatctatttcagtattgacagagctcttggttctggttaaataaattaaagatgggaaaagtgataaaatgtcaattaagaaagccaacaaaatcccctaaaggaagaagagaagccattcttctaacttcaaaactgatccttgctgaagacaaaacttccaagaatttgctcttattatacacatcattccttaaagggaaattgacagacatggatatcaatctcagttacaccaccaactagtgccgataaaccgccaagcaagagcttctaaatttatgatttgtgattaaaacaaatatttagtaaaataattagatggactaaacagcattttagagagctttttaagacctaggattttggatacagtatgcatcttaacacaaaaatcatcaattctatattgataactaataataataaaataagtatgtaagcatgtgaagtatagattctgctctctctctaaacagtaccagaaactcctgcaggagtgctttgcttgactttttgacctctgagtacgttaatattttaaggtaaattccgatttaagtacccaaatgattataaagcagggcttcaccttggtgttgtggttacaattctgcatatcaaggaaaaagagaaatgcttcactcccaagtctcgctcctcattttcagtcttgaggtacctttgtttacaaaggatttctcactgcttgttttgtactgccacctgctggtaagcaccaaactttatttttataaatgagaaatctatacacatccactcttagttggtgttacactctcagatttttataagttttaagaaagtttccttcacatttgcaattattaattatttctcatggtacaaaattttatataaccattaaaatatagaaaacacaaataaggaattaatagatgctgcatttccatctcccagagataatctctggtatacagccttcaagaacacacaattgggttatatgatgtttatcatctaaaatcaaatgtgatgtcatttaataattatttgttggatacattacatgtaatcatatgtcaatttattttcaaacatttggaatttttttcaattttttttgttatttgtttgatgtagcaatatcctcgttttaaaaccttatactcagctctaagctatatgaaatattactagaaatatagctagtacatcaaaggacttcaaaatgggaaggcctttgacatgtacagacaagttcacctccagaagtctatacgaattcacactcctataaaagtgctactctctccacactgtcatcaactcctccttttaagtattttaaaaaaaactactccaatcatatcctgaaggaaaactggatacttttatcatttatatttattttattgggagtgaacatttatattcatatctattaaccgtttctatttttgcatttctaaaatgccttatgtccctctgccaggttttctattttagtgtttgtataaaagaggaagtaatcacttttcatgtatgttccaaatacttttgctggtcatatattatttgatttcatttgtggtatttttaacaatagacattttcagtattgatttagtcaattacatcagttatttccttcatgtggtttgcctgtggttttatgtttagaaataacttccttgttcttagaattattcattattttatcttgaaggaaactgttcgaattccctctgtcatgcaagaagattttatctagatatttttcctgtggcagttcactaagttgcctggcatgagactgaaggttgatctatgagtcattatcacattacaccatttgttttttctgtacttataggaatttatgacactgacgtgcaaaatattttgaggactttataaggaatcccttattatgtctattaatgggctagccatctctcctccatagcattccacacttataaattctgttcgtcaataaaaagcaaaaatcatattttacatcaaataaaactcaccataaaattcaaccacaaacagaagcagacttctattattgtgaggttactaaaatgagaatgggacctaggaggagggcagcttggccagctgccaatcaattcataccagaaggttgtctttttcttatttatttcttctaaaaaaaaagaaagatacatgtgcggaacatgcaggtttgttacacaggtattcatgtgccatggtggtttgctgcacctattgacttttcctttaagttccctcccctcaccccctaacccccaacagaccctggtgtgtgttgttcccttctctgtgtccatgtattctcaatgttcgacatccacttatgagtgagaacgtggtgtttggttttccattcctgtgttagtctgttgaggatgatggcttccagcttcatctatgtccctgcaaaagatatggcctcattcctttttatggctgcatagtattccatggtgtatatgtaccacattttctttatccagtctatcattgatgggtatttgggttggttccatgtctttgctattgtaaatacataccgtgtgcatgtgtctttatagcagaatgatttatattcctttgagtatatacccagtaatgtgattgctgggtcaaatggtatttctggttctagatccttgaggaatcaccatactgtcttccacaatggctgaactaatttacattcccaccaacagtgtaaaagtgttcctgtttcaccatagactcgtcagcatcgtttcctgactttttaattaccgccattctcactggcatgagatggtatcgcattgtgattttgatttgtatttctctgatgatcagtgatgctgagcttccatgtttgttgaccacgtaaatgtcttcttttgagaagtgtctgttcatatcctttgcccactttttgatggggttgtttttttccttgtaaatatgtttaagttactcataaattctggatattagccctttgtcagataggtagattgcaaaaattttctcccattctgtaggctgcctgttccctctgatgatagtttctttgctgtgcagaagctctttagtttaattagatcccagttatcaattttggcttttgttgcaattgcttttggcatttttgcatgaagtctttgcccatgcctgtgtcccaaatgatattgcctaggttttcttctagggatcttatggtttttggttttagatttaagtctttaatccatcttgagttgatttttgtacaagtgtaaagaaggggtccagtttcagttttctgcatatggctagccagctttcccagcaccgtttactgaataggagatcattttcccattgcttgtttttgtcacgtttgttgaagatcaaatggttgtagatgtgtggtgttatttctgagatctctgttctgcttcattgttctacatgtctgttttggtacaagtaccatgctattttggttactgtagccttgtagtatagtttgaagtcaagtagtgtgataactccagctttgttctttttgcttaggattgtcttagctatatggggtattctttgattccacatgaaattgaaaatattttttttcctaattctgtgaagaatgtcaatggtagtttaatgggaatagcattgaatctataaattactttgggcattatggccattttcatgatattgattcttcctatccatgaggatggaatgttttcccatttgtttgtgtcctcccttagttccttgagcagtgatctgtagttctcacatccctcgttagctgtactcctaggtattttattctctttgtagtgattgtgaatgggagttcattcatgatttagctctcggcttgcctattgttggtgtaaaggaatgcttgtgatttttgcacaatgattttgtatcctgaaactttgctgaagttgcttatcagctcaagaagtttttgggctgagatgatggggttttctaaatataaaatcatgtctgcaaacagaaatattgacctcttctcttcctatttgaataccctttaattctttttcttgcctaattgccatggccagaacttccaatactatgttgaataggggtggtgacagagggcatccttgtcttgtgcccactttcaaagggaatgcctccagcttttgcccattcaatatgatattggctgtgggtttgtcataaatagctcttattattttgagatatgttccattgatacctaatttattgagagtttttaacacgaagggatgttgaattttatcaaaggccttttctgcatctattgagataatcatgtggtttttgtctttgattctgtttacgtgatggatgacgtttattgatttgcttatgttgaaccagccttgcatcccagggatgaagctgacttgattgtggtggataagttttttgacgtgctgctggatttagtttgccagtattttaattgagaattttcacatcaatgttcatcagggatatttgcctgatgttttctttttttgttttgtctcttcccagttttggtatcaggatgatgctggcttcatataatgagtcagggaggagtctctcctgttcaattgtttggaatagtttcagaaggaatagtactagctcctctttgtgtttctggtagaattcagctgtgaatccatctggtcctgggcttttatttggttggtaggctattaattaccgcctcaattttagagctttttgtctcttcagggattcaactgcttcctggtttagtcttggtagggtgtatttgtccagaaatttacccatttcttctagattttctagtttatttgtgtagaggtgtttacattattctctgatggtgctttgtatttctgtgcagtcagtgacgataccccctttatcattttttattgcatctattttattcttctccctctgctttattagtctagctagcagtctatctattttgttaattttttcaaaaaactagctcctggatttgtttatttcttggagggtttttcatgtctctatctcattcagttatgctctgatcttggttatttcttgtcttctgtagcttttggattagtttgctcttgcctctctagctcttttaattgggatgttagcgtgtcaatttgagatctttccagctttctgatgtgggtgtttagtgctgtaaatttccctcttaacactgctttagctgtgtcccagagattttggtacattgcctctgttctcattggtttgaaagaacttattgatttatgccttaatttcattatttacccaggagtcattcaagagcaggctgtccaatttccatgaaattttgtggttttgagtgagattcttaatgctgggttctaatttaattgcactgtggtctgagagactgtttgctatgatttcagttcttttgcgtttgctgtggagtgttttactcccaagtatgtggtcaattttagaataagtgccatgtggcactgagaagaatgtatattctgttgattttgggtagataattctgtagctgtatactaggtccacttgatccagagatgagttcaagtcctgaatatctttgttaattttgtttctctttgatctgtctaatgctgacagtggggtattaaagtctcccactattattgtgtggcagtctaagtctctttatagtctctaagaacttgttttatgaatctgggtgttcctgtattgggtgtatatatatttagaatagttaggtcttcttgttaaattgttccctttattgttatctaatgcccttttttgtctttcttggtttaaagtctgttttgtaggagactagcattgcaacccctgtttttttttgttgtttttttttttttgtttgtttgtttttgttttgtttaccatttgcttcataaattttcctccattcatttattttgagcctgtgtgtttctgcatgtaagatgggtctcctgaatacagtgcactgatgggtcttgactctatccaatttgccagtctgtgtgttctaattggggcatttagcccatttacatttatggttaatattgttatgtgtgaattggatcctgacatcatgatgctatttggttattttgcacactagctgatgcagtttcttcatagtgtcattggtctttatatgttgctgtttttgcggtgactggtactggtttttccttttcatatttagtgcttctttcaaaagctcaagcagagcaggcctggtgataataaaatccctcagcatttgcttgtctggaaaggattttatttatccttcacttataaaacttagtttggctggatatgaaacgccgggttgaaaattcttttctttaagaatgttaagtattggtccccaatctcttctggcttgtagattttctgctgagaggtcctctgttagtctgatgggcttccctttggaggtgacttggcctttctctctggctgcccttaaaagtttttccttcatttcaacctagaagaatctgatgattatgtgtcttcgggttgatcttctcatgttgtatcttaatggtgttctctgtatttcctgaattttcatgttggtctgtcttgctaggttggggaagttctcctgggtaatatcctgaaatgcgttttccagcttgtttccgttctccctgtctccttctggtactccactcaatcgtaggttttgtctttttacaaagtcccaaaattcttggaggctttgttccttccttttcattcttttttcctctattcttagacaagaatgcatatcttatttcagtaaggtagtcttcaatctctgatatcctttcctccacttgatcaattcatctgttcacacttgtgtatgcttcatgaagttttcatgctgtgtttttcagctccatcagatcatttatgttcctctctaaacctgttattctaattagcaattcatctaaccttctatcaaggttcttagtttctttgaattgggttagaacatgctcctttagttcagtgtacttttttattacccatcttctgaagcctacttctgtcatttcatccatctgatcctctgtctagttctgtgtccttgatggagagatgttgtgatcatctggaggagaggagccattttgtccttttgggttttcagcatttttttcattgattatttctcatctttgtgagtttgtctagttttggtctttgaggctgctgacccttggacagggttttcgtggaggcctttttttggttggtggtgttgatgctgctgttgccactttctgcttttttgttcttctttcaacagtcaggtccctcttccgtagggctgctgcagtttgctcggggctcacttcaggccctattcatctgattcactcctgtgcctggagaggtcactcaaggaggctggaaaagagcaaagatgggctcctgctccttcttctgggacctctgacctcgagggccaccaacctgatgccagcaggattgttcctgtatagggtatctgacaacccctgttggaagtcctcacccagctgagtggcacaaggagcaggacccacttaaaaaagcactttgtcccttagtggagagggtatgcttttcttcgggggaaacccatttgtctgggctgcccagattccttagaactaccaggaggagaggctaagtctgctggtccacagagaatgcagtcacccttccccctaggtgctgaggcccagggagattcgaattctgtccctgagcctctggctggagttattggagatcctgcagagaagcctcacccaatgaggaaggatggataaggtttatgcctgaagaggcactctggccacaacttgtgtgttgggctgtggggacaagccttgggaccaagccattcagcctccctggctccagcaggggaaaagcacagcctggagctatggaaatgggtgccgcccttcccctgaccagggagcttagcattttaggtagttgtgagtcccagcgctggctgatgcccctcccctaaggagctcaaatgggttagacagcaggcagccacagctggtgcgggtcacccctcactccaggagttcagtaggcttaagcagattccagctgagaggctgcaagaatctaaccattctagggttgggacactaagccctggtggcatgagtttgcaagtgggatcttccaatccatgggttgcacagttccgtggaaaaagcacagtttccccagctgggtagcatgctcactcaccacctcccttggctggggagagggggttccccttccccgtgtggctctgaggtaagctgctgcacctcactgttcttccttctctccaagagtcacaccagcctttttgtcaattttgatgagaaaacctggataccttggttgctggtgaagaattcacatacttactatggttttttttttcgatgggagcctccgaacgttgctgtttctagttggccatcttggccccgccccagaagtttcttcaacatgagtcatgtattatggagttttcctaaatttataatatggtgaagtagaaagtgtggtgaacaggcctgggtatcacaaagttagctctggcaacactgcaacccacagaaaatcatctaatttatcctttcctaagtttcctttacttctgatgtaaaataagggaacttgagttaatgatctcaaagatgttgatatggttaggctttgtgtccccacccaaatctcatcttgaattgtaatcccataatccctaggtgttgaggaagaaaccaggtagaggtgattggatcatggggacagcttccttcatgctgtttttgtgatagtgaatgagttttcatgagatctaatggttttattttattttttgagacagagactccctctgtcacccaagctggagtatacaatctcggctcctttcaacccccgcctctcaggttcaagcaactctcctgcctcagcctcccaagtagctgggattacaggcatccaccactacacctggctaatttttatatttctagtagagacaaggttagacagggtttcaccatattggccaggctggtcttgaactcctgacttcaagtgatctgcccacctcaacttcccaaagtgctggtattacaggcatgagctaccgcacccggccaagatctaatggttttataatgggttctcctgccttcactctaccactcttctctctcctgctgccttgtgaagaaggatgtgtttacttccccatcttccatgattgtaagtttcctgaggcttctccagccatgcagaattgtgagtcaattaaacctctctcctttataaattacccagtctcaggcagttctttataacagtgtgaaaataaactaatacagatgtcttcactctctaacttaccacaaatttatatttctcagacacacttggataatatctcaatcaggtcaatacagtaatcaacagtgttcactgtaatatacaataatcactaaagcaccttcatatggtgccacaaagcataccattttgaggaaatagaattaaaaatgggacatttttataccagatgtaatatgacttggcaaagaaactgcacaatttttacagtaggacacaatggtgaataacttacattaccaaacacaccattaaatgggtagaatagctgtcacttctgctcagaattacatataaagagagagggtcactcacaatcttacactcatcaaaactcctattgtgaactctaccactagcacatgactgatataatttataggcaaataaatatatactcagcaactcaactatcttaatcagctcattaaaaacatacagctttatttgtttatatttttaaacacatcagttctttacttcttgaataatgttataaaaatttcatacactttttatgattttcctcttatatacagccattaataagagttgaagttttactttaaatgcccaaaccaagggaacatttgcttataaaaatctgtaagttttgactataatcatataatctatttttgactataaactcatttagggaaaataaataataatttgatcattataaataactaagtaaggacataattcttcaagaaccaatataggacaacttatctgtctttaccaggtgaaactagtcagttctccctctgtggctgagtttcagagcaggaaaaaataaattggtgcataattttcataactcttatgatcaaaaggaagccaaatagcaaatgtgtttgtatgttttatttttatttgtttctttttccttttttcctttttttttttcttttttttttttttttgagacagggtttcactctttcgcccaggctggagtgcagtggcccaaacatggctcactgcagcttcaacctcctgggctcaagtgatcctcccacttcagcctcctgagtagctgggaccacaggtgcacgccaccacactgagcaatgaaaaaaaaaactggtagaaatgggatcgcatcatgttacccaggctggtcttgaactcttgggttgaactcccacctcggcctcccaaagtgctgagattacaggtgtgagccactgtgctgggtgtatatattttttgtttgtttttgtttgaacctaaagtcaaaaagaaaatttctcttgtatttctctgcaggagagacactgcatattgtaacataaaatattacaaatatcatttttagagcaaaggtagaagcacattttatataaatctagaagtatcctttgatacaaattaaggcataatgtaaaaatcggattcttggaggaactaggtgatatgatacaagtatactccagtgaagtaataataataacatcaactaaatttactgagctcttactctgtgccagctactctgtctccaggctacctatgtgcaaattccaactcagtcacttattaactgtgtaaccttgggcaattctgtagctctctttgtaaaatgaggaaggtactaattgcattagtacccacttcctagagttactgtgagcttttaaagtatgggtctggtgtgcatgagtgtgcacgtgtgtgggcatgagagagagagagagagagagagaagattatattcttatataaatgaatcttgcctcttcctgttttctattccattcatttatctaccataagggattccactgtgatgaaaaaaaaagtatcttgtttcctcagaaagacatttagaaatatgtaaacattttgctttcatctttatatttatggtaattctaaggatattataaacttgcagtggtaattctgaagtataatatatattcagggtcacaaaacagggcggcaaggatgataactctattagcatttaaaaagcataaaaatactaataagcacaaattttcctactatagtaactgtagcctgaagttaagaataatagcatagtgattgtaattaataataatatatatttgaaaattgatgagagattaaaactcaaatgttcttatcaaaaaatgataagtatgtaacgtattggatgtgttaattagctttaattatttcacaatgtatacacatatcaaaatgtcacattgtacaccataaatatatacactttttatttgtcaattataccctgataaagcttgaggaccaggagaggaaaaataagaatatacaaaaatggaaccagcacgatagttcacgtctgtaatcccagtgctttgtgagaccgaggcagaagaatcatttagcccaggagttccagaccagcctgggtgacacagcaagatcccatacctactacacgttaaaaagttagccaggcatggcattaaaaaattagccaggcatggtggcacacttcctcctgtagtcccagcctgtcgggaggctgaagcaggaggatcacttgagcccaagagttcaaggctgcagtgagctataattgtgctgctgcactctagcctaagcaatagagtaagatcctgtctcaaaaaaaaaaaaaaaggaagaatattattgaaaaatgaggtctgcaagaaatggcatatcacaatggctagaagacacagtgatttaagaaggaactcggatgcttagtaaatattatgaagacaattctgagcctccagatgaagatagtggatgaaattccactatcttctaaaacacccactaaaatgagagcataaaagttttataacagtatgaacagagaataacacagaacaggagaaggggataagattctggaagcaggaaattgtgaggatgtgtggaatctgatgttgtcacctgagctttgcaggcagtacaacaccaggaagcaatatgatttgcttgcccaactcccaaagggtcaaaaattccccatgccacctggaagtggtagggaaagggactaaaaataaacagtttgcttgaaagtcccatgaataatcagcaaggcccattccatatgctcctactcatgacagctgggtgacccaccacctccaccactctcaactgccaaagacttgtgagctatttttttggagagggtgaaactgatggtttcaggactagaggaaaccacatgcatttgagggaagggtaccatgctaaacataagggggactcagaggaagttatttcctgaacactgagactgcccaggctgctccaacctcccattcacatgagtctcagtttacagcagtggcaacctgacaggtaacttacaggcttaagactgaaagatgctttgctcagaaatgtatcaatcaacctgtgttcattttctagagctgctgaaacaaattatccacacacctgtggattaaaactgtgtaaatttattctctcacatttctgaagacttaaattctaacattaaggtgctgtctggaccatgttccctctgaagctgctaggggagaatccttcctttcctcttccagcttcaggtaaccccagtccatcctttggcttgtggcatcatcactccaatttttgcttctgtcttcacagggatctcttcctctgtgtttgagagtgtgtctcttctaagaacaccagttacttgaggttaagggcccacaccactctggtctgaccccattttaattgacctaaattcatctgatatggtttgtctctgtgtctccacttgaatctcatctcgaattataatccccacatgttgagggagggaagtgattggatcgtgggggtggtttcccccatgctgttctcatgatagtgagcaagttttcacaaaatctgatagttttataagcgtctggcatttcccctgcttgtacttctctctcctaaagccctgtgaagaaggtccttgtttccctttcaccttctgccataatttaagtttcctgaggcctccttagctatctggaactgtgagtcaattaactccttccctttataaattacccggtctcaggtagtatctttagagcagtatgagatcagactaatataacatctgcaatgaccatatttccattttgaggtactggggattaggttttcaacgtgtatatttgagagtcactattcacccataacaaagacattctcagataaaggaaaactaagaaaatttgtcaccagcagacctagaccaaaagaatgccagaggaagttatttatctgttatttatcgaatagaaaggaaatactaaacaaaggactctttggacatcacgaagaataaaaagaaaaaaattataaataaaatagactttttcctcctcttgaatttttaatttttgttttgtatctaagcaaagattataacaatgtctgatattattcttagtatatatacatgagatattaaaaataattatatggggtatataaatggtggggagtaaatgggcttaaagagaggtaaagtttctatatttcacttcaactggtaaagtgttgacaccagtaaactttattaactaatgcatatatagtttaatagctagagcaaccactagaaaaccaacaggaaaggagatacaagagatactattgataaatcaaaatgaaattcaaaaatgttcaagtaacccaaagaaaggcagagaaaaaataaagaaatgaaaaggagagagagaaaaataaaaaagcaaaattataataaaagacttaagcactaacaagcataacaacaattacattaaatacaaatactctaaatacaccaagtaaaagagactgatggagtggagtgaaaaaacacgacctaactacaagctgtctacaaggaactcacttcaaatataatgatatatatacgtggaaagtaaaaagatagaaatatacatgccatacaaacaatgatcaaaagaaaataggagtggctattttaacataagatacaaaacaaattcttaccatatgacccagcaatcatacatctaggcacttatgccaaataaatgaaaattcatctttacatcaaaacctgtacacagctggatgtggtgattcatgcctgtaattccagcactttgggaggctgagacaggaggatcacttgagcccaggagtttgaaaccagcctgagctacatggtgagactccgtttctacaaaattttttttaaaaaattagccaggcatgatggcatgcacctttggttccagctactcagaaggctaaggcaaaaggatcatttgagcccaggaggttgaggccgcagtgagctgtgttagtgccactgcactccagcctgagagacagaaggagatcctgtctcacacaaacaaacttgtacacaattgcttatagtaactttatttgtaatagccaaaagacttggaaacggccaaaatgtcctataggtgaacagttaaacaaattgcagtagatccctgccatgaaataaaattcaggaataaaaaagaacaaaatactgctataaacagcaacctagatggatctcaaagtcattatgcctactgaaaaaaagccaatctcaaacattatatgatccatgtaggtaaaattcttgaaatgacaaaattgtagatagggacaacaaattagtagctgccaaggatgagggatgctgaaaaggaggtggaggtaatgataaatgggtagaataaaaggatttttgttgaaagggaacagttaggtattttgatcatggtggtaaaagaaatctgcacatgtgataaaatgacatagaactacatacatacattacagaatttcagtttcctggttttgatttttgtgctttagttacataagaggtaacaactggaggaaactaagtgaaggctaaacaagttttctcagtgctatctttgaaactttctattcatttataatgtattcaaattaaatggttaaacaaagccaaaactaaaactaactttaaaaagaggcagacaaggatcccagaaatgagaaacaaagcaccagagaggaataaagataaactcaaaaaaaaagttttcaacaggcctaaatataaataatgtggattggggcaggcaggaaactacagaagaaatgtttccaagatgaaactgaataattatcccaagtgcttgatcacattgaaaaattattataaaactgagagcaagttacagataaattagtaataagtacatttaatcaaaagcaaacccaaagcagatgtcatttccagaaaaaaataaaggtaggacatcaaaaaaggacatttaagcataacaacatgaatcttctgaagtcagtgtttatagtcataacaatataaacattaaagacttatttacctaaaacaatcacataatagaaagatgagaatattataaatgtacatatcggaggagtgggtaaacagagcttaatccctatcttccattattatttctattaatttacaacctcaacagatcacatcagttttgcacatatcaacggataaggtacaaaactgaaatatcaaaagtagcagcataattacattatttgaccaaaaatatttttcataagctttgtagaaatatatatttaatcagatacatatatgtattactctgttttcacactgctataaagatactacctgaggctgggtaatttatcaaggaaagacgtttaattgactcacagttctgcatggctggggaggcctcaggaaacttacaatcatggcagaaggcaaaggagaagcaggcaccttcttcacaaggcggtggggggtggggtcgaagtgccagatacttatcaaacagctagatctcgtgagaacccactcactatcacgagaatggcatgggggaaccacccccattattacaatttgagatgagagttggatggggacagagccaaaccatatcaatatacatatataaaacaaaaacttactcgactccaacaaatcctgtgctctgtcactatatacagaacagcaacttaaaaacctctcaaatgacaaaacaaaaactttcttgcccaaagaaaatattcttaacactagaaaaaaaaacattttttgattaaaaaatcacattttaaagaaaaacaaggagttataaaatatttttatggaagtctttgaactcatattctaatatgtcaacctgccaaagacagaaacatttgcacaagaatgttttctggaaactagataaaaataatgccatatttttatctgaaaaaataaatataagtcgatgtcaaaaaccccaaaggtgttatcatgaagccaaacattttatcctcaaagatatatctttatttggaacattctgacgaaaatccaactaggtcaaataaaaatgcagaatttaccatcaaagagtacacctcctggctccttcacacagcatttttatttatcttatcatgatcatgtcctaaatttagtttctttctactctttaccagagtaaatttgatcacactatatttgattcaatgttgagttgacattacttaaatattttcaaaaccttcatgaccaagtgtcatttcttgcatgcaaacagtcttttaagctaaaatagctgatgtacagcagaaattaaattgtccttaaactatgaagttatattactggctgtccccactctcacccatcccttgcagtcaatagctggtttaaactacacgtacagcagtaaagattggttactttggtccattaagaatagcggtttttcacacacactatttatcagaatcactcagacctcatcccccgaaattatttttgtagtagctttatggacatataactcacataccacagaattcacccatttaaagtatccaattcaatccatgttagtatatttaaaggtttgtgcagctatcacaattaattttagaacatttatatcacttcgaaaaaaaaaaaacttggctggccacagtggttcacacctgtaatcccagcactttgtgaggccaagggaggctgatcacttgaggtcaggagtttgagaccagcctggtcaacatggtgaaaccctgcctctactaaaaatacaaaaaattagccaggtgtggtggcgcatgtctgtaatcccagttacttggaaggctgaggcaggagaatcacttgaacccaggaggcagaggttgcagtgagccgagattgcacccctgcactccagcctgggtcaaagagtgagattccatctcaataaataaataaataaataaataaaataaaaaaataaccatgagctattatccccaatcctccctttacccagccctaagtattcgctaacctattcagtttctatgaatttgcctctctatattgaatcatacaaaatgtcaccttttgtgtctagtttctttcacttagcacacatttcataacagcacttcattctatttgttgcaaacaatatttcattgtacggatatgtcacattttatttatccattcgtcagttgatggacatttgaattgttcccactttttgactattacaaataatgccaccatgaccattcatgtacaggttttggtgtgggcatatattttcacctctctttttatttgaggggcagtctcactctgtcgccaggctggaatgagtgcagtggcactatcttggctcactgcaacctccgcctctcgatttcaagcgattcccctgcctcagccacccgtgtagctgggactacaggcgtgcgccaccacacccagctaatttttgtattttcagtagagatggggtttcaccatattggccaggatggtctcgatctgttgaccttgtgatctgcctgccttggcctcccaaagtgctgggattacaggcctgagccaccatgcccggcctcgcttctcttaaatatatacctagaattgaaatctctgggtcatatggtaactacatgtttaaccttttgagatacttgtccaagtgctctccaaagtggctgcattttacattcccaccagcagtgtaggaagattcttatctctctccatttttgccaacacctgttataatctgatcagtcattttattattgccatactggcaagtactcccagagagtttggttcaattggtgtagctgttgtacccaggctgtatgtttatttatttatatgttatttgtctacattgagtgattttaaaccagcatagagagtcactctttttttttttttgagatggagtcttgctctgtcttccaggctggagtgcagtggcctgatctcctctcattgcaagctccgcctcccgggttcatgccattctcctgcctcagcctcccgagtagctgggactacaggcacccgccaccatgcccggctaatttttgtatttttagtagagacggggtttcatcgtgttagccaggatggtctccatctcctgacctcatgatccgcccgcctcggcctcccaaagtgtgggattacatgcctgagccaccgtgccccgccgagagtaactcttttagcctctatcagaaagtacctcatatgatcgagaataaaggttatgtctctagcctaagaacttggaaaccatttctgccaggtgaaggtaaaccaaataagccagtgataaaacgagataaatatgtgtatagacagtttgagcatccctaatctgaaaatctaaaatccaaaatgctccaagatttaaacctttttgaacacccgacataacaccatgagtggaaaattccacacataagtacctaatacaaactttgtttcatgcacaaaattatttgaaaatgtttaaatttaccttcaggctatgtgtacatggtgcatataaaacacgaataaatttcgtgtttaggcttcgattccattcccaagattctcatgatgcatatgcaattattctcaagtttaaaaatctgaaatctgaaacacttttggtcccaagcatttcagttagttcttcttactggactataatctactgcattcattccagtttgtcaaactccagctgaaacacctcctcctcaatgaagcctggtctctccaactagggttagatgctctctcatttatgcccacacagcaaaactcagtacactccagatattatactaaatgctctttgtcatttatttctcacaacaaccccatgaagaagttattattatcctaattttacatataagaagctgaagttctaaacaattaatttacacatagtccttgcacatggcagagccaagatttgttcctagggctatttgactccaaagtcactgatcttctcactgatttgcttgccttcccattataacgtttcacacacagctgaaaccatattgggcagatcttgtattttaaaaactaaatttttttaaaaatctgcatttttgcctccatcattaattgttccttttttctctatgtgcttattcattcaacattagacattgattctctgctacacactggcatataattgtatatcggttcttccagagctgacattctagtgggggaagcatataccaatcaaatgtgccatgggaaaattccttcagattatttgtctcttgctccaggtaggagcaaatgaataaaaagaaaaaaaaaaagagagatggctttgaaggcaggccgcttgatacatttcccaaaagaaaattaaactcaagtcccagaagccaacagcaggccttgtcaattaaatttcaaccagaagacattcactcttttgcaagtaaaccacactggacatttcaaaatttgggaggtaaagaagaagaagtagccatattattttccacagagcaatttcatataaactcaagagcaatgctattagagattattaagcaatggacaatataaacaaggagttgagatttttatgggaaatgaaaaatgaaaaaaaaaattctgggattaaagacttccttacttgaaggatatattaacacatagctaaatgacaaagtaaatggtgcacaagtttcagcatattcatcaaagattcataaacaaatgttctaatcaattactttaacttctatgctatgaattatgaggaatgcaaagaaatctcacccccagcctctaacctcatctacagcctggcttgcaagatggaacaagatgcatgcattctacaaacatttactctgcctcaggcaggtcaccaggcatctcagatccaaagggtagcgggctaaggcagcttccaccctcaagaaatttacagttgatgtggagaaaaatccctacaaatactgatgttttagttctttaatgcagaataactataaaaatagttaccattccttgagcccgacctacatgagcccctgacatattcacaacaacccattaagtagatatgcttatgtcattgtcattgtaaaaatagtctagctggccggttgtggtggctcataactgtaatcccaccactttgggaggctgaggtgggcggatcacgaggtcaggagatcaagaccatcctggacaacaaggtgaaacctcgtctctactaaaaatacaacaattagccaggcgtggcggcgcgcgtctgtagtctcaactacttgggaggctgaggcagaaggattgcttgaacccgggaggcagaggctgcaatgagctgagattgtgccactgcactccagcctgggcaacagagcgagattctgtcaaaaaaaaaaaaaaaaaaaaagtctagctgaggttcaagggaggatatgtgttttgcctcaagccacacagctggtgcaggtattacaactcacactcaacaaattccaaagttcaaggtttcttctacccgccctgggtttcatgccacctcccacagaggattttaagaaatcttagttgtataaattttcatttactttgggaatgattgtgtctttcaaagtttaatttaaaatgtaagtaaatttcaggtgcagcatttcatctcagctgacaatttatctctaatagaagagagctacttcaaattagacaatggaaacctcttttgctttagtctgcaaaaccaccactagatggcggtacctacacagttattctaaggccagtagggaacatggtctctttttcagtaagcagttggcttcacaaaaagtaagtacttcttttaaaaatctaaatttctgtattattattagatacagcaactgggtcacagaggggtggaggtttaagactacgtaacatctttgctacatctgtgtgaagaacaggatgtgtctttcctagttagctcatcgtcaagacattcaaagtttcttatatcgtttcctaaaacagcataaacaaaagatttaatttctgtgtagattattgtttttgtgccaataaaagacaagatatttgtgcttgctcttacaaagaagaaatcaagggaggcagaaccttatgttattccttctagttaaataaacatgatgtctaaggcaacccacccaagttgggccttccaaactattacttaagaaaatgaacatcagattcagtttgcgtttgttttaaaggaaattgatttgaataggaacccagaactgaagtccggtttcttcccattttccatcttcatatacatttgacagtaggaaaagcatggaaatattattttggttatgaaactgccatgaaaagctgcctcagcatgtcatttaacggaaagagctccaggcaaagccattatgtggatgggcaaatgagaggaggctgggaagaaaccacatactgcttgcgtgagtattaagtttaagccatggaaagagagaatgagaggctagaagaaataaaaatgatacaaactaagcactgtgctctcattttcataggaaatagcatcagccattcaacaatcattccctgataagtgtgttcaatccttaaaacaatttcgaaattacttacgattaaaaacatatttcatcaatgctggaaatctaagcaaccactttaatacgatactctacacacactcattgtatcttgtgtttagagtatgttacagagtacactcaaatttcacatacaccagaataggagaggaatttcggaggctttagaggtgggatttacctttccaaaacctcacattatgacaacttatgttccacttctcaactttaaattttttaaaaaattaattcccaggacaagttttgtattatatttctatttgaatatgaaatagaaaacacattaagaaaaaaaaagagaactttcaaccagaagagggcgctatcctcaaacttaaaatttccacactgtactcataaagtacctttgcaattctgaaagatgcttcagcataatccagcttaatcattgccttataatcttagaaagaaccctaaccatatccttgaagggtggaatgaccgatttgcacaatattctcattttcaatactcaaagtagccattataattccaagttaatgacaacagaagctgaaaaggtatcattctgtagcatcacaatcttcataatttgtaacttttaaaaatgcttaactcttgcattcattcaactgaaatgtgtggctcctttatttgcctgcgcactccacaaaaaaaaaaaaaaaaaaaaaaaaaagttatatcttggaatacatcattttacaaagactgctatttttcttggtatcttagtttaaggggcaataacagactactctaggctgggcagtttattatcaacagaaatgtattcctcacagatctggaagctggaagtctgaggacaaattgccagcatgtttgggttctggtgaaggctctctttggggctgcagctgctgacttctcattgtatactcacaaggctggagaatggggcaagcgagctctgagttattttgtgtgtgtgagggcattaatctcattcatgagggcttcatccttatatctgagtcacctcccaaaggctccacctcctgataccatcaggaggtattagaggttaggatttcaacacaggaattgcggggcagaaggtagaggggacattcattctatagcatttgagtaactggaaaataaagcagacaagtgagaatttgaagaagaaaaggaggaagaatgggaagggtgctgcttttagaaattcctgttcactgcagaaaacaagacaaaaacaagaatttatgtgggcagagaagataaacacaaccgcgggactcactctggtgagtaagatgtctgtgtccacactcatcctaactggaggaaagttgactgctttttcctacttttatggctttgagtaggttccttaacatacttagtatttccattcctcagctgtagaaagcaaacaataataagaactacctctcatgcctgtaatcccagcactttgggaggccgaggtgggcggatcacctgaggtcaggagtttgagaccagcctggccaacatggtgaaaccccttctctactaaaaatacaaaaattagccaggtgtggtagtgcatgtctgtaatcccagctactcgggaggctgaggcaggagaatcacttgaactcgggaggcggaggttgcagtgagccgagattgcaccgctgtactccagcctggtgacagaatgagactccgtctcaaaaaaaaaaaaaaaaaaaaaaaaaaaaacctacctcataggcactcttcatccctacactctctctgtttttttgagacactgctttctgattttcgtggtgggaagggttggcttgcttagttgcttatttatctctcttgtttctctctctcaatagaccctaagtttcacaagcacataaaccgtatctgtcttatccccctccattcccagtgtctagaatgtggcaggcccacaacaaattctagctgaaggaatcagcaaggagatgttatggagctctaccaaaatactaacccagaacttgagacatggtcagtcatgagaatttccactacactctgcttctgtgatgttaatttttatattaacatataaaataatggcatatatagattttgaagtgtgtgctaatggcataaaattgccctcataaataaatgaagtcaaaacttactgatttaaagaaaactattaagtaaataatggaacagatgctgtgtgtaaatgtcaatacgtgtgaaagtggtcatggataacagaagtttgcaaaactcactagatggagaataagcataacagaagcctggcaccaagagtgagggtggaggtcggaggaagtttaaggacttggtttcacagctgggcattttggagatggctgaggccagcagacagaaaagcccagacttcccacattgagactgcacagggctgcagacatagatttgtattcccaggtttaaccacctctctaactttatggaggagaatctctgattgtgaagggttatgacttaccaaactacccactggatgtcttcctgtaatgttgagaagcatccatagtttcctatttctttgtaaataccaaacctagaaaactacacatgacagtcaagggcactattctaaatattctaaatgctcagagtatgtgagagaaatttggaaagaatcctctggctcagagtcaacagatgagagaaggaaagctactgccttaggtgtttgggggcagaaattttccattcctgagaagcaaactgaggtaaggatagtcaacattcatgggcagtcccagtttttgttgtacctttaaaaaaaccaaagcctaaaatgagtttctgagaaaagaaatctatccatatatcaatggaaatttgtatacccagcaaatataagatagtatcagttcttcaggaggaattatcatgaaacctgtgcacattgacacgttctggacaagtagttattcttttttgagatggagtctcgctctgtcacccaggctgaaatgcaatagcaccatctcggctcactgcaacctttcaacctccacctcccagcctcaagcaattcttctgcctcagccaccccagtagctgggattacaggtgtgtgccaccatgcccggctaatttttgtaatttttgtacagataagatttcaccatgttggccaggctggtcttgaactcctgacctcaagtgatccacccacctcgacctcccagatttctggaattacaggtgtgagttaccatgaccggcctgacaagtagttttttcaataagagaaaaacaaaataaaattcaaacacatatcttataatttaagagacagagttcagaaaagaaataaataccacctgaatcctccttttatgtgaaaatatttaattccatttaatcatacaaaatctgcccatataaattgtcttccaggtctgggcccaattgccacttaaggaaaaaatacatgaaaatataccacaggggtatatacccaaaggattataaatcatactgccataaagacacatgcacacgtatgtttattgtgtcactattcacaatagcaaagacttggaaccaacccaaatgtccatcaatgatagactggattaagaaaatgtggcacatatacaccatggaatactatgcagccataaaaaaggatgaattcatgtcctttgtagggacatggatgaagctggaaaccatcattctcacaaggacagaaaaccaaaccccgcatgttctcactcataggtgggaattgaacaatgagaacacctggacacagggtggggaacatcacacaatggggcctgtcacggggtagggggaggggagagggatagcattaggagatatacctaatgtaaatgactagttaacgggtgcagcacaccaacatggcatatgcatacttaggtaacaaacctgcacgttgtgcacatgtaccccaaaacttaaagtataatttaaaaaaaaagaaaagaaaatataccacaggggaagataacattgattggatcatctcagatttcacttaattctatcctgtcaggggccacttactcataaactgcttaattgaatgggtacattttcaatcaattgttttgtctcatgaaaatatatacctggtagacagcgtgagcactgacagcttcctgaagccatctgagtatgtagagcaataactgcaacacgagggatgctgtaaatatagggttgccctctgggaaggctttcacctacaattcttggggaggctcagagaatctgagaccctggcttaaaaactcactgagacagccgggcgcagtgactcatgcctgtaatcccagcactttgggaggccgaggcaggcaggttgcctgaggtcagcagtttgtgaccagtctaaaactccagctctactaaaaatacaaaaaattagccaggagtggtggcatgcacctgtaatcccagctacttgggaggctgaagcaggggaatttattgaaccagggaggcggaggttgcagtgagctgagatcatgccactgcactccagcaggggcaacagagggagactgtctcaagaaacaaaaaccaaaaaacgaacaaacaaacaaataaacaaacgaacaaaaactcactgagacctgaagttcccttcgtctctccagccaaacccatgattaccctcaagtactcagcaaataggccttttgtccttactacagactgaattttcagttccccccaaattcaaagccctaactcacctcaaactgagattgtacctcaaaatgagattgtattcggagacagggcctttaaggaggtgatgaagttaaaatgaggccaccggggtgagcactgatccagtctgactggtgtccttctaagaagcggaaattaggacatgtaagtagacatccgggaagcgtgcacacagaagaaaggcagtgtgaggatgtggtgaggagcgtagtcaaaaagcaaggcctcagaagaaagcaaacccagagacgccttgatcttggacttccagcctgcagaactgtgagaaaaacgtctgttgcgtaagccacccagtctgtggtattttgttatggcagccccagcaatccagtacagttctcaaagggaaagctgcctgataaatcaccctgtgcaatgtctatgaggcaaagtgatactaatatagaatctgacttttcagacacggaaaaattttaaaacaaataggtcaccaaggatttgtctaagtaagtgaaaattctagatgaacttgaaatactcttctcattggaattgtctgtctattttggatgccatttatatgggacatctcacacaatacttttttttttctgttgctttctgagttgattttcttaagtatagtttagtaaaaagagatgcaagggtatattgcataatctctggtaaatctgcaactgaaacacactttcttctttgaaaaaaataaataaataaatttcccgggtgtggtggctcacgcctgtaatcccagcactttgggaggctgaggcaggtggatcacctgaggccaggagtttgagaccagactggccaacacatggtgagaccctgtctctactaaaaatgcaaaaattagctgggttggtggtgcgtgcctgtaatcccagctactaggaaggcagaagcaaaagaatcacttgaacccaggaggcggaggtagcagtgagctgagattgtgccactgcacttcagtctggactacagagacagactctgtctcaatcaatcaataaataaaaattaaaccctaataaacatggagatctctgtggtttagctcttatataacatcacattacactatttaaagcaagttttgttctttactctggtttctcatgggatgttatagaacttggttcatatggcctgtaatgtacttcttacacaattttttctctttctcaattatctatagcacaggttctctccaacctttcattctccaaaactccctccctacatcagctttctcccctccctgtaagtccaagccttccccatttcttccaactcttcatggtgttgactggagtgacctcttccaatgaggtctttcctacgccagactgtcaagcttggtccttctctgtctgatctctggcatctcaaaatccaggactctctctggtcatatagacacacatcttcatttaacttgcgtgagagaaagatgtctgaaatgaaccagttaaattgtgtacttgagaaacgtacccttaaagataatgagccatttcttaaaagcgttcacctaatcttaagaaaggaggtagccatctctaagccatcatctatatgtgtgttatcctcttatttttggaatgacacatctatgttacttgatgactacaaatagatattatggattggaaatttcattttttaagtctgaataataaacattcaggatgtgactatgaaactgatgcatttatcaatgatttaattctgtggtttgcgggagtcaagattacatgttccggaaaagcccaaagtttgtggatatctcaccctttaagtgatacagtattttacagtaaaatgattgtttttatcaatagttgatgcctagcatgctccctttatattgaacgcttctgacattggcaaagcttggacatattctgagcaagaggctccattttcattttgtgtgaatttttggtttgtattttctaccatcactagtcacagaagccactcagccttcccttcttctcaactgcatcctttgatcaacactacccacaattatagataccgtcccatctatgcctgtctgcctcattaattctatttatttatttatttatttttagagacacagtctctgtcactcagactaaagtgcagtggcgtgatcatagctcagtgcagcttcacgcgtctacgcacaggtgacctccgggccactgtgtggctaggagtacaggtttgtgccactgtgcccaagttatttaattaatttattttttaagaaacagggtctcactatgttgcttaggttggtcttgaattcctggcctcaagttatcctcctgcctcagcctcccaaagtgctggaattacaggtatgagctaccatgcctggccacctcattcttttctcaaaaacatcagtttttttttttattttactttgtccatttatgtttcttacacagtatttatgtcttatgcttttgtatgtcttataaaaaggtctcaattttatttgagttttccacatttgaatgcttataacttctgttttctttgcaaatctataggatgtcattgttatatttgggttgtattttgtttcacttttttactgggttatcttcttatcactgtgattatttatctcaggcacaatgaattttactgaccttcaatattataccaaagaattaataagataagttatgtattgatatctgattcttagagactgaactgagactctaaagaaactagttaacaaaaatggtttgataggatagctgccaaatttacatgataaacactctggtaaggttcccatgtcattcctaatgtcactatatatatgaggccaatggagatgaaggaataggcagaatgagaaaaaaggcagtgctgtgatagtaatcagaatagtatgatgtaaggatatacagcttattatacgaggagtattttcagattgccccccactcctagcttaccaaaaagcatcttatagttgcaattctcctttcctttccttctttctctctccttaagatgttgcacttaaatatataaaatacaaaaaaaaaatacgtacacacatatccacacacatcttattctaggagattaaataaaaacctacatgtatacatatcagacttatatgcatatatgtatttggatatgtgtatagtatactctgaagatgagaaataaaatgcaggatgggcgtggtggttcacgcctgtaatttcagcaatttaggaggccgaggtgggaagattgcttgagctcaggaattcaagaccggcctgggcaacatggcggaaccccgtttccacacacacaaaaaaatacatatatatatatatatatatatttgctgggtgtggtggcacacatctgtagtcccagctacttgggaggctgagcactccagcctgggtgagaaagcaagaccctgggaaaaaaaaaaaaaaaaaaaaggaaagagagagagagaaagagagaaagaaaaagaaagaaagaaagaaagaaagagaaaaaatgcaaagagccactcttttaagctattctccaatagattaagagaatgagaaaaaaataagctgttaagctttttggaggtgatatagtttgaaagtgaagaaatatctactttcaatgctagatttcagctttacatttataagttcctcagaaactatctgaaagttttgtattcctgcacacttagaaggcatatgaaacaaaaaaggtaaagatagaaaaagctaccctgcttcaaaataatcagttctttctgtgggttaaaaactactaatatatttggcttatatatttggtgtatcaatacttttcacccatatataataaaattcatttccaatctttggctacattatcaaaatgttttaattaattgactatgagctgacattttcctagaagaaatatcaatttttacataacagtccatccaggaaaaaaatgaaaaaaaaacctctataatttcaacttttacattcttgaaagtatgagcatactaagaatttggtactttaatgatataccattaataataataagaggtgctatttacagagctcttactaggcaccatgttaagtgctttccaagaagaattttctttagtattcacaacagtctaatgaaggagacaccattattttctctcttttacagatgaggtaactgagatttagagaggtgaacttatgtggctgaggtctattatctctagtaaatgacagagccagaaattgaatctaggtatgggtaactccaaacaccacactcttaaacttttctttatattaccaacattttaaaagacttctccaagtgctaatcctggcttactgtattagctttcgtaatctttgacattaatattggtcaaaagctatatgatacctgtttgttgcagggaggtagaggtagtgactaagaaattagtacaacagcactcactaaaatattaatatatattcactttcaaattgcttagttatgactttaacacgttaaaaacaagatagtaaatatttgttgaatgtgccaggtgcaaaggagttacagaactgaatagggataaagacttcatgttcaggcccttagaacagcattgaagacacacttctgaactctggaatgctgtgatttctatgtcacatgtcaaccatttaacaaataagttccttccctccttctccctagaacaggggttagtaaaatacactccatggagtaaacttgacacactgcttatatttgtaaataaatctttttagaacaaaccacatccactcatttccttatcatctgtagtttcattcatcctacaatgacagagttgagtagttgtgaccgtgactatacgactgcaaagtttaaaatttctaccatggagcccactatagaaaatgtttgccaacccctccactcaatctggataagaatcttcttaaagataatctctatatacagcacacatctttgatagctaagcttatagaaaaatcctgaatattctccagcctcctaaggagaaatgagttctttccccctaaaattgtccattctattggtgtgttaaaaaaatcaaattatcagtgacaaaattatttaaatcaagttggtactacattatttcaagatcactgggaattttgattatgctatagggctctgtaactggcagttttcacggttgattttatggttttcaactaaaataataagagacactgaagacttgctataattcattgttttacatttgctttcttattagatttggtttgttttcaaaagggcctttaccatcattttctttccttttctagctgaagcaaggattataaaaatgaaccaaatcagatcaattcatatagtaaagttaccaacatttctaaagaactaaaataaaaaataaaaccgtgactccctaggcaaaatactttcaaataacatagaagtttacagtcaaaagaagcaagtgaattatttgccttgagacaacaacccactccccaatcatgtacattttctgttttcgatgaatggtttctactttcatcatcattcacatgatgatctaaaaagaaaggactgaggcaataataaaacaggacctacaggaattgaaggaaaatccaatactacttacattaatatagaattccgcatacaaactccttccccaaataaattgcaggtatagcagaatataatatactgccaaacatagcatgtaatattatgatgacaaacataaactctcccgatggcctcaggtaatcaagcacactatagcttcgaaaaaagattatggtcataacatttgccaacgtttctcatgagaagtctctcctgccttctttagtcaaactggggccaacactttcattacattcattctccgagtcagaaactttgcaaggcactgtgcaagattttttgaggacatcttctcagaaaaatcagggaggttttatgtccattttacaggaaactaaggttcagagacttttaaatgtgttccctcggatgatttaactagtgtgtgagagagaacatattctaacaccagttttcatagcttcatgtccaaagcacttttatcattacataagcaatagaaggtatttgacacgtaatctttttaaatttatgttaaaatcgtcaaggaataaaaataaagctctaaaatagattgataaatgtgctgcagtagacaagaccccgttgaatttaaaaatcactggtcatgtaaaaccagtgaccaacctctagttgccaaaagagtggctttgttcctggcaagagaaagaagggaaagggagttagattggtgattatagaaattgtgccatggatttggtattaaaacaataccaatttgggacacacaagtcatgacatacatcaccaagttgtggaggcaggcggaggcattattcctcatatctgcccagaacactgcttggaaaatggtggtaaatgacacatgaagaattttacttatttattttattattattattattattttttgagatggagtctcgctctgtcaccccggctggagtgcagtggcacaatctcagctcactgcaacctccacctcccgggttcaagcaattctcctttctcagcctcccaagtagctgggactaccagcgcgtgccaccatgcctggctaactgaaggatttttatttttttatagctgcacagcaccaggatgtagataccaggctgagaagcagtggcctcttagacagtgccataataaaacacccttcttaagagctatacagagagaagtcatcaagaaaaaaaaatagtaggaaagggatagagaacacaaacagaattcagggaattttttttttaaaaaagaataattttaggtggggtgcatagggtagggcacagaaggggctaaggtcctgaagttcttcatgggagaaagaatgtttaatgagaatgggaattaatattaatattattctaatttttcttaaccccaggctactgagactgaagtgcagactgttgcctgtcttacaaatcaaaaccacagtatttgaccactatgccaggaatgttaaaatctgactttctccaacaacaagtgaacatttcagtttttagtgttttaatatttagtatgaatagagtttttcactaggatatttagtatttgatagaccttacatgtcttatctcatttactaatcctgaaaaccttaggcctgtagtaatattatcctcgctttacaaggaaccaaaactcatcgtctctctgcctcccttatgttgctttgcagtttggggagcatagtttttgtttttgttttcctaaataaaggtttgtgcctctaaggtaatcaggatatgtattttttatttccatattgcagataagaaaacaaaggccaaaaaataataaattatttaaagaaatgtacatcataatagaaacagatctggggctaacatcaggtttcctgactcctggactggcattctctacattgtacaacaattactcattgttgtttatcttcagcttctagcaacagacatgggaattaatcactctctgaacatgcttttgaaggaaaataatggttgagtggatgaatggaaggctgacctattaataaaaaagcacaaaaataaagacacggttccaataacatctaaaaaagatatcatacatatcatcacatttcctaaaccacattctctctcaaaaattgcaccccaactttcattcccagaaaacagccttcctattcaactgatagagtcagctttaaaattactgatcctggaatttttttaaaggggctttaaaatggccaattatcacaacaggatggtatatttcaaaatttccttatatcaattcctgaaccaaccttcctgaaattctcccagttccatgtcttccctagtacttcatttttgacacaaaggttaaaagtaaagggatgaaggcctgctccagaagacagacaaagtgaattttagttccagtatatagcaggtttttgacgttagtaaaggtagtaaacgtgccatgcatcaagccggtaaatgtcacgacatctcttgagttgcccaagccagaacacctccctctatctcccacttccttgatcctaatccattatacagtcttatttattttagctataaaatatatccaagaagagtctacaactctccattcttacttcctctgttgtcacccaagcttttatcacttctcatctaaacaaccctctgggccagtcttcccacatccaacgtggatcctccccaatatgttcttcacacaacatccaaaaatctttgtacaatgcactgtgatgtgataacaccattaccttccctaaatgtttcaatggctttctttcagctctttgaaaaaaagatcacaattttcaacattcagcctctaacactggacctcacctgcccaacccccaccattaccctgccctctattgctactggtcttctctcaatgtctccaaaatgctaccctatctgctgtctcaggtcctttccctttgcccttcccacctttccccttgtctgtccttcttacctctcagttcaatagacacttccccagtgaagcttccagacccctgttatacaaacaggcaattcctgtctccagagcactgatttcattggcaattttctactaattagcaaattatcttacttatgtctgtctctctgaacagaataaaagctccatgagaactgagacaaagtctctttatatccattttacctccaaacataaagtacttgatctccaggcaaagatcacggggaatagatcagcagtcaaacaaagccaggctcattgcaacaagggagaaagcaaccacgtggaaccatgaaggaaaggtctcagtagaggttattaagaggggcttggtacaagatttggctttgtgttagaagattttgtggaagattcagacaaatctaattttcctctcaactggggactgtgaattggatttttctgttgaatgctgaaaagcaaggccaattctatgactgggtatcttagtagttttcatttagaaggcaagaaggacaatgcaaggctaaaatgatggtaaagaaacagcagtcatgttagctgagcacacatggtcattttcatggcttgggttgtgttcttgttttgtttgtgatcagacatgattatagagtggtcttgtttttgtctcactccatcatgatcatacagtgaccttgtgtgatgtagatattctgtgaaattatatatttgatgaacaaacactgaattagcagttacaaccaagccagctcagttgaccacagaaatttcactttttctttttcctcactaataaataatcctgtgacttggttgtagaagtcattcatcaaataattgatgaaaacctgaatgaataaatttagccactcttagcatcagctgcttcatgtttgggggataacatttcacctgctcaaattagaccagaaaatgactttaaaccactgccactttaaaaacctataattctaagatattcaaaatttacttgaatattcatataacagcctatagatatgttatcataaatataaaaggaaaactaagttatagaattttgtgacttaatgaaaactttattatctccctccacacaggcacttacattcctaaacatacaatttcattctgtcacattccactgccattccactcactaacaaacaatatattgaaacctgaaatgttagaacgctaagaacaaatttatacaaagctaagaacaaatttataatgtttacctgacaacagagaaatgactacaattcaatggagaagaaaaagaccacaaattaaaaatattccttcactggtttaagaggtagagattaggatctcactgtgagagttcactctcattgcagaacagagggctgagaaggcagaaggacatacagccttttgaacatccacatgtggtaatggttgcactactctagaaatctatacagaatcactggatattacatttgcaatgggtggacttcatggtatgtaaattatacctcaataaagctattaccaaacaaaagttggtggaactccatctagatgtattgatatggttgggctctgtgtctccacccaaatctcatcttgacttgtactctccataattcccatgtgttgagggagggacctggtgagagatagttgaatcatgggggctgtttcccccagactgctctggtgcactaccagagcaccacgagatctgatggttttataaggggtttctgctttcattctctcttgccaccaccatgtaagaagtgcctttcatcctctgccatgattgtgaggcctccccagccgtgtggaactgtgagtccattaaacatttttcttcccagtctcgggtatatctttatcagcagcatgaaaatggactaatacctgtatgtccacctaacaggaacccgaggctgtttaccaaatatcctgcagtctcactctttaaaacaccttcatctgtaatatctctatactctctgcctccatgaattttcccctctatggaagatttatcaagcaaaatgggagtggaaaatctcacccttccagctacacccttcctgagccctggccagtaagcaagttcatctcacttgaacacttgaaccatccagactgtggacttcatatccaaaggccctgtgcttggcagggcatgatacaggtgtggcacatattaagcaactcagtaactcatagtagtggtgttaagaattaggcatgatgaaatgaatgtgtcaagaatgtaggttacaaatggagctgcttttcctttaggaattttctgtttagatggacacatcaattgtatcctggttttcttctgacatataaaataggagacaagtgacactaataaaacagcatggtagttaagggttttttctgcctttcatatgcttaaatgttaccaaaacattatatactctggacctcttccaaacgaagctgcattagaggcttcaggtcaatgttttttaaggtacagtcccacaaaagttaaggtgggacaataaaatacatacattgtgtcatgtagcatcacagggtgttattcagtacaatatagcaccccatatagtatttagttactacttgcctgaaaagaagatctatgtctttccatcttgccgtttacaattctgtatttatttgaattatttcaacagtgacctgtagttattacattaatgttacttgtgtactcagaagtaaaaaagtgtgagaaaattgtactaaaaatttgtcaccaaggccagcaaaaattacttttatatagaagaatcttgttacaacctatgcaaaagagggagatgactgattaatattttagttatactctttcaataaatatgtagactacctgtcacatttcaggcactgtattcagcactgaaatacaactgtgcataaatgcacactattaacttctcaaagttcatgacctgttgggttagacattaaacaagtaattatttttttaaaaaaacaaatcagaagttgaaagggaaaacatatgagaagtatcaaatatgcatggctaaagtatttttccatgaagatgaataggaatctatagacattaaaagagcagttcccaaccttttcagcaccagggatcggtttagtggaatacagtttttctacagacaaggagggttggatgggatagttgtgggatgattcaagcacattatatttattgcactttatttctattattattacattatactatacgatgaaacaatcataccactcaccataatgtagaatcagtgggagccctgagcttgttttcctgcaactagatggtcccaccttgaggtgatgagagacagtgacagatcatcaggcattagattctcataaggagcatgcaacctagagcccttcacatgcacagttcacactagggttcatgtgtctatgagaatttaatgctgccactaatctgacagaaggtggtgctcaggaggtaatgcaagcaatgaggagcagctgtaaatacagacaaagcttcgcttgctcactgacactcatctcctgctgtgctgcctgattcctaacagaccacagactgcgactcgtccatggcctgagggttggggacccctgcattaaaagtccaattctgtcctgcatctggtaatttacacatctccatgaaggccagctacctgatggcatgcgtgttaatacatggccatctaatctgtgaatctataagaaggatgaggggtcactcaatctagggcagcttgccatgcatatcaataaattaaattatggttacctatataatcaatacacgttaatggctacttattgattcatcaacaacttattctttcaagttctgaaaacacatgagttgttcccagaaaacatgttaataacctgtggcttaaggttgatgagaacattccacaatgtgtcatgacaatactgcattagtgtcagtgttccttcattgcccgattggaattaaaattctctattactcagcagtccacttaatgggacaaaatttctgacctatctaatcctcattacacataaaactaattgcatccatgagttactgaaataaaatttagatcctcatgcatcatcaatcaagggtaaatttagcaaattgaagcctttcttcaatattgcttctgtaactaagtaatatatatgtaaaactttacgtaaaatttaggaataaaactggaggaataaatatttccctaaaagctaggtttacattgagtatgactggccaaggtgtttggtaagttaaataaataaataaaaattgtattaacgttaacatatatgcatacattaaattacaaagaaaattatttcactcagaatgtatagttttgacatatgtatatcatatatcatagggtagaaaggataatacttagtggtttctggacttgagatatagttttgatattgtcacatcccaacatggaataggaatctgctttagtctcccttcttccttagatcatagttaatacagttgatccttgaacacacaaatttgaactgcatgagtgcatttatacatagattttcttcctcttctgccacaccttagataggaagaccaatcctttcttctcttcttcctcctcctcagcctactcgacatgaaatcagtgagaatgaagacctctattatgatccacttccacttaataaatagtaaatatatattattttatgatcatcttaatattttcttttctgtatcttacttcattgtaagaatacagtatataaaacacataacatacagaatatgtgttaattaactgtttatgtcatctgcaaagcttccagtcaacagtagactattagtagttaagttttgagggggagtcaaaacttatatatggatttttgcctacattggggattggcaccactaactcctacattgttcaaggtaaactgtatatgcaatggatggctagccttaaatgatgtgtgaggaacacgttaatgataacattcaaattttagaattctctccaggtttattctctttcatgaacatgattccattagctccaaatctataattttggggatgattcctttgtctaatctgcactcagcactagaagagaggagctacaaaagctctactagagctctcaaggagagagtggctctgagaagaaactctccaagatggagaattcctgacacaccatgccaggcttcacagctcaaagatttcaaaaaatacatgttttctcagaagagcaataaagtccatgataaattgctctggatttgaaagcattttgtgatggttaattttatgtctcaacttgactgggctgtgggatacccaaatagctggtaaaacgctatttctgggtgtgtctgtgagggtgtttccagaagacattagcatttgagtaagtagactatgtaaagaagatcagattcaccaatgtgggtaggcattaatcattccattaagggctcaaataggacaaaaaggtggaggaagggcaaattcactttctatcttgagctgagacatccatcttctcctgctcttggacaccacagctcctcattatcaagccttcagactcaaaggctcaccccagtgccgctaacccctacctcggttctcaggcctttgattcaaattgaattacaccactggacttccaggttctccagcttgcagatggcagactgtggaatttctcagcctccataatacgtgatctaattcccataatgcataaattaaacacatacacacactattagttttatttctctggagaaccctaatatgcatatgttcacctaaaacatgtttaatgtaggtatctcatctttccaggcttcatcatgcatacctgggcagttatctagtgtagtgcatgatacaagaaactaatggtattattttgcatatacctaatagatttacagtgtctacagtttccttacttatttaaaccacaggaagtttaattcttttttgttatttaactctacacatgaactttacacacttcaaatgctactctaatgatttgcattttcaatcataagtttatttaatttgtagagcatctctgacaggtcagacttatattagccttttacgattcacaagggaattaatgagaccagggtcctgcctgtttagaactgacatcctagaaagaagtaaggcattaatccaattatcatgaagatcatgtaattgcctcctatgcttagaatgcatgtcattcttttaaggtatggtaaatggcagcaaccgttttacaagcaaagactccagagtctgcattcagacagctcactgggaaaagccaaggttagatcaccaagtggacagagaaagacaccatgaaggttgaacaagaggggactgagaccaatggagactgctgagcctgttaggaaaggaggatgaagataaaaagaaaagaatcatttaataccacatatctgctatgtgatctcattatcctatcaagtacataaaacaagaacaatgcatagaaatattcaatagcataaaatcataaaactggtaagagattacaactccaagaagtgtgatctctcttcaaaatctttgtcaactcctccttcccccaaccctcccaccttctttttgcccaaacctcttaaaaatcagagagaatttggctgggcgcggtggctcaagcctgtaatcccagcacattgggaggctgagacgggtggatcacgaggtcaggagatcgagaccatcccggctagcatggtgaaaccccatctctactaaaaatacaaaaaactagccgggcataggggcgggcacctgtaatcccagctactcaggaggctgaggcaggagaatggcataaacccgggaggcggagcctgcagtgagccgagatcgcgccactgcactccagcctgggcgacagagcgagactccgtctcaaaaaaaaaaaaaaaaaaaaaaaaaatcagagagaatttttcctagtacccacagatttttttatgagaaggaagaactattattagagatgactggcctattgctaggctagtgtattccccaaagagaggcaatggattcccttatacatcaaacaccaaagacaaaaaaactcttgagtaacagtctgaatgaggtaaacaaattcagaaagctgtgctcattgcaaaatggggaagggaaatacaggttttgttatcttttaataccaacaattaagttaacatgaaaattttttttagcgccaacatattccattcccactttactcttactataagggacagagtaggcagcattagtcccactttaactaacagagaaagacatttaccacatgcttgacttgagccctctggctagaaaacacatggcaaaagtaacacaaatgagagaatcagggatttcttagtaaacagcaacacatttcagatttacaatactttaaaaagcaaagatcaaacatgctactcaatcctacttgataagctgcctccatttccaaggttaaagatggataagagtaaaacccaacatctgattattccatgaactctctcatccactatttgccatagggtatacagtactatataaggatttgggtggaatagtgaaggaatattttagactttaattaagccatagttcatgtctaaaagaaagcttgtaagctaacaaaatgaaatagataacaatgtaatgttatccaggtgttttcaataaaaccttgccttttataatcccacttcaggacttctgaatctgcagcaaaactcaagcgaagtgggtaggattcgctgagccttccactcatgttgtgatgggagctactcatatatggccactgaatttaaagagtaaataactggagaaagaagagataaaacagccttgtagacacatctgagtggcatatttgtttttcttttccttcctgtaagactaaatgaatgtagtatgtgtgatttgaccaagaaaaggaatgtgtggaatgacaggataaaggtcacaggatagctagcatgatgcttgacagaatttaaactaggcccatgaaagaatgttccaagaaagctgcaaaatgtgtctcaaccaacagaggcaagatctcgtgagaatcccttgtcatggttacaaatgaggccaaatggcagttaatagtggaggttgccttgaaattctaaatatccacaaacattcttactgtttgatgagctacaccaatttttcagtgaataaagttaagctgaaatatttacaagcaatcatgtgctggataaattcatacatgtttggctcaagaaaaatgtctctaggtatcccatgtaacaaacaaattggtatattcacaataactattttccagaaaataaaaattaacgcatctagttctacaaaaagaggctactttattttagattatcatcatcctttattacttaattttttcccttaagatgaatactattaactggactcctaacagtctattaattattaacatcaccctttgagaatctaagaaaataagcattgtattaaaaacaaatattgctcttttataataccctccagaacaaatgtaatggtgggaatccaggcacagatatttaaattaatactctacatattatagggaatgccagcaaataaatgcaagatttctgtattccaggaactcataacatagctggaaaaaaagagacaaactaaaaaaagtaaacaacacaaaaagacaataccatgagctatcagctgtcaagaggttgggctagttattaaatgtcagcatccataagagttgtttagctaaatattatgcttgtacatgcatgaagctgtagtaaaatgaatctcaatccacaaactcaaattgcaaaaaataagtcaatttctttattttcttaaaaccaatttaaatttgactctgttctagcatcacaccatatgatagaaaatcaaccacaagaacacacaaagatcatacaaagatcctgggctcttacataatgctaagaaattgggtgctttccctacttttcagtaaggctattggtcaaaatcactggtttacctactgtctcacccaggataagcttttccacagccagaaattctgatgtttctgtgtagtgcttgggatataggattcctatgccaggatccacactttcacataagacttgagatacaggattcccgtacctacgtccagtcttgtgtgtcatactcaggataaatcctgtgcctaggtccagcttgcctaggtgcccccaagaggctacatcttctaatggcttctaacttttccagatgttgccataatctgcaaagtttcctgatactcctggaatactgaaaacctctggattctgccaacctggaaagaaaaataagtccctttcatttatttctactttccctttttagaacaattcatatcacctctgcaacaaatccaagcttctacagaagaaaccaagagtttctagcatcagtttctattttctgtcttgcaaaatccctagctatctggttgaaaggagaaaaaatgtattttaacaagaacaaatagtattaacaacacaaattaaaaattattaccatagattttcctgctaccaacaacacagagaaaaagttatttaataatttttacaacatctagacaaatatataggtaagatagaatcatccatctctcaacaagaagttgttaccatcccagagaaaaacttttcagaaacttgcccaatggtgactaactttgaagtgtaacacaagtaaagcaatttgaggacaaagatccatttgtactcatgataaatgagtacaaaaccataaagaaacataagtaaatgaagagtacagagaagagaaacaggcaaactaatgcaaatataataacatagttgcatagaaaaaccctttaaaataaatgatatacatttcaaaaatgtcaaaaatattaccaggccatatactttctcacatcaaatgcagtaaggtataataggagataggaagtctcccctttagacccttgtgatttatccttcgtttgatgagcacttactgcaaaaacagaaaagctccctgaaagagttgcatcaatcacttttgccagtttctgcataaaggtagaatcattcatgtcctagatctgagacagctctgaattaaatatgataccaaaagtacctgtcaaaatgcattgagtgtctcctatccagatattgagttaggtgctttacatgaagcatttcatgtaacagccagagaagttctgtcaagccggttttttttaatcattattttacaggtgagggaaccaacgctccaggaagataagtcaggttttcgaggtcacactgctagtgactgggaatcacgaggttataattcacatatttctaatctaaccttttctgatctaagaccctatgaaataccattgatctaaatcaaagggatatttgagcaaaaatactaacctaaaaccttaatgaaatctgactgatatggtttggctgtgtccccacccaaatcttatcttaaattgtagctcccacaattcccacatgtcatgggagggacccagtgtgaggtaattgaattacagggatgggtctttcccatgctgttcttgtgacagtgaataagtctcatgagatctcatggttttataaaggggagtttccctgcacaagctctctcctgcctgtcgccacgtaagacgtcccttgatcttccaccatgattgtgaggcctccccagccatgtgaaactgtaagtcaattaaacctctttcctttataaattacccagtctcaggtacatctttatcagcagcgtgagaagagactaatacactgacgtacttctaggcatcaaaggaactggctgagccccgttaagagcaaaaggctgaagagggacattttcagactcgtacacctctaaggaaaggagggacctgcaaatgcccaagcttcaaaagtcagttcactaccttcagactaagagggcaggtaatgtttcccccaggcatgtgatgtgctccgtggctgtctcagtgttcagttccacaggaaataccatcctgatatgacagaaacaattaaaattgacacagaacttgtttccataaaactaaggagtaagcctgagctctaacaatcttaccggggcaactttggcaacatcacatcctccttcttaaggccatttttcaacaactttatagaattgctgggagtcagacaatgtaagcaaaagtactagacaaccaacagaacactatacatattatgcctgttattaattcatttgaaagttatataaggaatgctatgaggatcgtgtacaccaggttaaggtggactctaaaaccatctgcctggatgaatctcatctcagccaccaactagctagatgatcttgggcaagttactttgcctatctgtatgtaccccaacctcatctgtaaaaaggggataaaaattgtcttttgtgagaatcaaatgtgctaatataaaatgaagatgataatgtaaaatggggataccagtaaggattgttgtgaagaacatatgtgataatgtatgtaaagactcttgtaatgttataagttaggtaccattgttagttaatatcaatcattaccaaaccaccaccaccatcatcactcttagtacgattatcactaaagatgattaaaggtctaagagttatttatgtaagtgatggagtcctcagagttttcaaacaagataaaaggaaaaaaaaagcaaaaagacctcaagctttaacatttatagcataattatttcctgtgggtgtgcagactgacatctacaagtacataccaagacagaaaaaaaattgctatgttttgttatcatttgatataagctggatgcaaattatcctgtttgtgaagctaatttccattctcataaaagtactgcctgtaaaaatattattctagtatactttttaaatgagaaactgagttcacaaagtcttttattcagatctctccaagccagcatattatcttctccccattaaagagctttaggccatctgtcccatctagactaccagctggtatgatctccagaaatattcctcaactgtaggaactaattgggtttttccatatgtataaattgtagattaactgtatttaccaataaaaaaagttcaatttcatctttgtggcaggtgacctgatcttaataatgagggtgaatctcacaggcaggtcctttgggatggttgtaatgtttctactatcaaagctgttgcttgtgacaactctgggacattttttcttatacaaaatcaaagccagagttatgaactcatttaaaagagcaactgtaacagaagaaaatgtaggtttagaagaagtgataatgacatcaccagaagaagggacactgcaaaaatgtaccctaacatagtgttcataatgctgttatacaaaacatgatggctctccaagataaaattaaccatttccagataggattaaacataactctgaatatctatggacatgtgattaaacattatgaattcaacaaccaagctataatataactcatctttgtaagggagacacttaaaaagaagaggaaaggtgaggacctaaaaaagtgaaataattcacccatcaaataaaatgtctacagaaaaagatgactcaggaccaccaggagaacttcaaaagccaagtcaaagagctttagcgtttcagacatccttacagtcagttgttcacgtctccattgcattctctccctccctttctcccagtacacagcaccacctttgttctcccattaacccttaaactgggaagtctcttactattttctcatcttcctgccatcctctgatgaggatttgttatgaggacctgtgtttggtcatcacaggtgatctccacatcccacccctataattattagttgaccccaaagctttcattaggaatactctatgcctgacttttaaatcaggtagcaaaatcattgtgaagctgcccaatctggagcatatttcttgggttcggatcttggttctgtcaccaccagcttgaccttgagcaatgtgcttgacctcactgcccttagtttccttatctataaattgaggatcatgacaatagcatttagctttaaaagctgttgtgagaattaattaattaatgcctgtaaagctcttagaaaaacgtttcatagtatgtgcttgacagatgtgagctattattttcatgtcactaatgttgaccctgtgttctcctcttctattggttcctttgctcttattatcttcattccaattccacatattaagatccctgcccatccttcaagacccagaactgttgccagttcttccactgttgcaggaagtcagggaccccaaatggagggaccatctggagccgtggcagaggaacataagttttgaagatttcattttaatatggacatttatcagttcccaaataatacttttataatttcttacacctgtctttaatctcttaatcctgttatcttcacaagctgaggatatacgtcatctcaggaccactgtgataattgtgttaactgtacaaattgattgtaaaacatgtgtgtttgcacaatatgaaatcagtgcaccttgaaaaagaacagaataacaacgatttttagggaacaagggaagacaaccataagggtgactgcctgcggggtcgggcaaaaagagccatatttttcttcttgcagagagcctataaatggacacgcaagtagggaagatattgctaaattcttttcctagcaaggaatgttagtattaataccctgggaaaggaatgcattccttgcgggaggtctataaacggctgctctgggaatgtctgtcttatgcagttgagataaggactgagatatgtcctggtctcctgcagtaccctcaggcttactagggtggggaaaaactctgccctggtaatttgtgatcagactggttctctgctctcgaaccctgttttctgttgtttaagatgtttatcaagacaatatgtgcaccgctgaacacagacccttatcagtggttctgcttttgccctttgccctgtgatctttgttggacccatatcagtagttctgcttttgccctttgtcctgttccctcagaagcatgtgatctttgttagaccctgattagtagttctgcttttttggcctttgaagcatgtgatctttgtacctactccctgttcttacaccccttccctttttgaaacccttaataaaaacctgctggttttgaggctcaggcaggcatcatggtcctaccgatatgtgatgtcacccccagcagcccagctgtaaaattcctctctttatactgtctctctttctcagccggccgacacttatggaaaatagaaagaacctacattgaaatattgggggtgggttcccccagtattctcccatatgcccctcagcttctcactcaaaaagcatcaacccctgttctgaaatccccagggggtaaccccaaactcagcttcatattttctaacttatattgtagagatgcatgttcatgtcttgtcatatttatatgtttgtacatttctagacagtaggtgctgtgtttgtgtttcccagtggcctgccctaattgaaaacccctgatacatatacagtagatctgagctgttcaattttgtagccactagtggtgtatggattttaaacaaattaaaatgaaattaaattaacaattcagctcttcagtcaccctagccagattttaaatactcagtagctacatgtgagcactggctactatattggatagcacagatatagaacattttcataaccacagaaatttctgttggatactgctgcaatagatagtacttgaataaatgttttttaaatcccctctgtattttagaaatgtgattctcttagaaactttctatctcatcagagctttaatcaaacaaatgctgaaaatgaaaatgagatttaggtcatcaagataattcattctgtgagactagtaaaaaacaaaacaaaacaaaacaacaaaacacttttttttctacaagtagagtagtagtgagggaaccaggaaccagtttcacattgcagccaggcaaacagcttaaaagatgcaaaagacatcacatcctttcaaaataatggaaaatgcctactctgtggttctagcatgaccacactttaagccatagctaattcatgcaaaattctcactcagatttctaaatttcttcataaagtttcaaacagagtctttccaggaaatttttttaaaaacagcatattttctttgcactgatattaggtgaggttaaaaccctgccagggcttcctgttgcacttagaatcaagtcaaagtcttttggaatgttcttgagtttcatctgtcaccaccctctctgttactggctggcttgcagccatgctggccttctttcagttcatggaaacaggcagctccccaaccctcccagccaacacagctcacaacatgctgcacaacacacactgtgccagatttcttcagtcttcaccttgattttcactccctcagagctgtcttgcctgactactccttccagtaccttgttattttccttcacgtgtaacctgatatttgttgtttatctgtttattgtctatatcctgcagtagacattaagtttggtgaatgccagaactatactcttttatttcccactatttacccagcatcttatgttgcagtggctagatacttaacacatgtttattaaatgaaaaaaagaagaagaatctcagataattaattttgttgaaggaaataatgatttttatttttaaaaaaggaattttaagttaacttagttttgtgattgcctttatgtgtgctgtggggtaagggagagagagaagatggaacgaggtttaattttgaaaatatcacataaaactatcaaatttatccttcgttcaaatttgtaaggtttgagagacacttacttattgttagaaaattatgagacagtcctttttggtgtgcaatatgagatttggtctcttttagggaaatagtgaactaagatttaatcttaaatattcattaaatttagtggcttaaaatactggagcaatgcccagatggaaagtggcaagatatttaatttgatatagctatctaaatgtcctctgagtactttttaaaaagcattttcattaaaaataatgaattgtttcactctattagtttgggttagaaagttaaaaaaataaaataaggcagatacactaagaaaatatcaaatgatcataaaaaattagatgtctccttgaacttatttttactcttgtgcaaatcacattacatatctatgtaataaacaatatacagtataataaattattttaaatgacactagattataagatatgtatgtatatcttatgtatgtgtgtgtgtgtatatatatatatatatatatatatatatatatatatatacatatatacacatacacacacacacatacaggcatgaagtactataaacttgatttcctatatatgtcgacccacatgcagagctggtttatccatggtcagacaatacatttttgaaaataagccaattggatgtatacaaatttggagaagcacttaagctatgcaaaaccacacaaattatggtccctgaattcagctgaacaaaatatacaaattatacaaattactaccagagtggcatgaattctgctaccttcctctgccattttaattcataagtcaagttgtgaccttaatcaaatgtaattttagaactggaaggggctttagaaaggttcggatgatttgtttattttgctctgctgataatttcacatttgcatcataattacatttctctaagttcactgacatttcagttagcttcaatgatcattaaagttttttcttctttaatctacatttgggtcatgctcatagggctgttcatatgcaaagaaacccatcagaaaatggctgatttccacattgtacagtcattctacttgagacactgaggttgaaaaataattgtcatttttaactaaacattatgcaactgataactgaacatggttatcactgataactatcaggcatattcatttttggaagatactgaaacatattttcagctgtgttatgcaattcataccatgtaccttgttgctatttgaggaaaagacagttttaatttacatctcctaataataaaatgcagttctcagtgttagcaattgttagctagtgaaaactcactgttctttaatttctacataatatatatagacgccactgttactcaggtggttagataccccaggtagataacctgacctgcaggcaattgtcttgtatgtcttgacccacccatgaagcaagagcttaaagcaaaaagtggagacacctttcaattccaatctcttactctaagaccaaagcatcctcctgtaggtgccattgaggcccaaaagattcccatgaaatatatttttaaggtcactgaatttttccaccatatattcaagaggatacatttcactggggaaagagaagtcagagccattccatttaaaaagaaatccaatctcttttcagaaatgttacccgcagttgaaattgagcagggaaatttaaaaattttaaatagtggctgaagcttagtatcatatggaattttaaaatttgtcacagaattagcaaacctgagaatacatattatgaaaatgttttagtgggatgaataaactcttcattgcagagtggaatatgcagttagataaatgcaagtaactcaatttcaggctttcttgtgaatcatcacagcctcattattacccggttgtcaataatgatgttagatgaatgaatgaatgaatgagtacagttgtccacattgttctatatttgtaataaacttcatatttaaaacatttaaattgaaaattttataccctattcattaagcctcttataaaatgtcacaatgaaacaattttacttaaatagtgatgactactacttctcccttggaatacaacatcttttctaactcacatttttacaatgcttttccataggagaagcatgtttgacaaattcaccaagatgaagcgctaaagctaatgtttacaaaataaaaaactggtgcacagaagacgtctccaacttatttagcttccattctacaatccacaaaataaagtaatcattgcctctgcaccaggattacacatgaattcatcaggatttctacctggcatcctagcatgtgatttaccaagagacatattgatattgtcttcacaggacataaaatagaacaaataatattttccattttcattatgctttcagaaaattaaatggcaaagagcatactgggaatctgttatgagatgataataaaattgtgtaattagtcagtgtccagaggcagagctgttctccagaagtcttcttgaggtttcctaagggagaaactttcttccctctgggattttattaggacaaatccagagtctcaacccaataatccaacaagcagatataaccacagggtactaatccaaaatgtcatccaggactccatgataatattatccagaaacaaatgtaactccctatttttatacttaaatttatctcttgttagtttctaaccatatattcatctagtgttttgttccatggtaaattggtagtttacatgggattacaatgaagggattataaagcggtagagattatttgcccagcagatggtttatgtatatttaaacagatatgaataagattttacaaaagaaaatacaagcttattaccagtacaaagtatattattaattttccttttttttttttttttgagatggagtttcactttttcacccaggctggagcgcggtggcgcaatcttggctcactgcaacctctgccttccggtttcaagagattctcttgcctcagccttctgagtagctaggattacaggtgcccaccaccatgcccagctaatttttgtagttttagtagagacaggggtttcaccatgttggccaggctggtctcgaactcctgagctcatgatccaccctcttcagcctcccaaagtcctgggattacaggcgtgagctgaccaaataatttttacataaataaaatatttggccaaagagctaaacttaaatataattttcctgattataattataattatttagatacagcatgcatatctcttaaaataaaaatatctaatttactatttctctctctcaccttctttcttttctgaaattcacaatgttcaaacttgattagaaagatctttctagacaaatctttcatacaagagctactgctgacttcatagaaggcatattatcaattaaacagtacttcgccattttataatatacactttaacaaacttttaaaatattatttatttacatgaaagaaaatttgttatatggttaaaccagagtttcaaattaagtgtatgctagaggggttacagaaaactatattattcaattttaaaaaaataaattctaaaatttcaaagaaatacaagctttcaacagctgcattctccttgtccaaacataaatgtgcatgccatttttgttctgtcttaaaaaaaaaaacaaaaaaactacagtccttccagatcttatacatctcaatacactggtacattttttaagaaaagattcttgctccccaccccaaatacactaaatcagaatagggtaagggaaggatgctgaaatttacacaacagtgggcatacaaggtgtttcaatacacatcccaaaatgtgagaatgactactcacctgagaaatcaggctaaatagttagaaaggcagtcagtgactcaacttttaaattattgagattctaattctaaaaacatgacttttatgaatccctcttggtaaatcacacacataaaaaaaaatgaccaccgatttttcccattcctgtataaacacccctctacaatgcagctttgcagctcctcccattaagaggtggaatgcatatctatacctctgggtatccatttttggccaggtgacatatttttgctaacaggacattagtgaatgcgacagaacagagagtggataagagctcgtgcaatggggcttgctgcttttcatgtttagctacgatgtgaagaagcctgggctagcctgccagtgaaacaaccacctttgcaaaatatcataacaatgagaaaagctctgatctaacggactccatcttgcttctaacctccaagctgctcctgttattcctggatataggccaaaataatgttgggagaaacttggtttacagtttaattttgaaacgaagatcataatagccatttcccaaaacaaatcctcttcttgcctggggaccagactgcctatgtaagactaacaaattagccacaagattagaaatacggtttaggagtcatgcagccagaggccgcaagattctgaacttcctaaattgctcctagggataaaatcactattgttaaaacctaagattggtgctcaaggcatttttcagaacctgcattctgatgcaccagctactaccaaccagaccagtaatctggctcaaccaattctgtgatcagaatcagaagagaagacagcaagaaaaatccacttggaccccctatgatttcatttccaacctgaccaatcagtactccacactctctggccttgcacccacaaaattatcatttaaaaaccccagtctctgaatgttcagagagtcttatttgagtaataaaactctggtctcctgttcagccagctctgtgtgaattaaactatttttctattccagttcccctgtcttgatagatgggctctatctgggcagcaatcaaggagaacctgttgggctgttacaccagatgctagagacacagggcccagttgcctccatcattcaatcaacagcaagatatgtgagagcgaggccatgctgtccccatccaatctactagctgactgctagtgaggcccagagaccaaaatggccaaactataatattgcaataaggcatgttgcttaaataactattattataggtgttttgttgtacagaaaaagctaaatgatagaccactttcacaaaaaaagcaaatagaagacgatgtttctgatgttaattttggtagtgttcaagctttaccacattctggaattatttcacatgttttcatttcaggacttgacgtaagtggtagacatatctgtacagaactagatgaattcaagaagtttaaacatactttttatcaagtgccactgagagatgtgaccaatgcaggaagaaaaaaatatgtataaaatgaacaaaatactttgtagaaataaacatgaaaaaaaaaacctgcaactggaaaaaccagctctgacatttatttttgacttttacaaaggaaattcacttgcattgttgaaaatttaagtttaccatggtaactgcttcctcacacatcatttttattcccaacaaaggtatttgtagacgatgatatacactctgttgaataggaaatttccatcataatgcttgtgtaagatattaaaagtcagatcatcaggctgcttgtatatataaagattttattacactcaaaggataattagaatggtttccacaagattgaaggtaatgacatgaagtatgtgaagatgctttaaaagctttcaagggctacaaaatattgtatactattacagcgacaaaaatattattttgaaggagacttccactatttagttttattcattgatttatgtaacataagagcactgttctgtgcctggctcacggttacctactaggtacattgaagttattactaaggtagacaattccatgctctcatggaaaccatattttagcaggaaaaacaagacggtttcaggtgtttacaagttctgtgaataaaacaaaacaggaaaatgtgagagaggatggcagataatttagaatggagaatcagggaccccttagggagatgacatttaagatgagacccgaataaaaagatagagccggtcatgcacattttgaagagctgagtatttcactaaaggaggacagcaagctcaaagaacctaaagtgcaaatggaattggccttttcagtgtccaggaaaaggccaacatggctgatacctagcgagccaaaaaagaagtgctaagggataaggttagaaaggtgcacagtgggcagagtatgtagcattttataagccatgcagagccatctggatcttatcctaaatgtctgtgtatatttgaaatctacataagtcatttttgacagttacatggggattttgcctgcctactcgacttcggtaatccaccatatgaatacagcaagcatggaatgttaactgaagcaatacaacaatttctaaactgactactaaatgagtaagactctggaaatattttgaaaggcaggatatttccacaaaagattcacttctaaaaccctttaaatatttcctatacatttcccactcagatatcttgatcgtagcttatttgtgtatcactaaaacagtaacaacaataaaaaaaatacagaactagtcaacaaggtgttttttaaataatttaaatctaggataaaagctataagacttaatcaaaaatttttaaacggtcactgaaataggattgttttagtaaactggtgttgaggttgattaaagatatgatcacatgtgaaaaaaataaagacaaataaaaatttgcaagtaattcagaggtccaattactctcctaaaacccaaataatagtaagttggagaaaaatctgtgctatacatagcaaaatatattttattccctctataaattaactgtataaatatgatcatctacatatgcaaactgaatgaaaaagtagaaaagatcatgttttagctgaaaagggttgaaaagtttgagatttcaagtaaatactgaaaacctaaaaagaatagcagaagggagcttgaaaaacttttctgaggctgtttccacaatagaagttttaaaaatacacacagttgaataatacagaaaataaattgtcatgaaaacaaatctgaataaatgatgtgtagagttactgcttcttcacatacaatattttggtaatatagtagatcccccctaaaagtaaacttaacactgcatcttaaataataatacaattggttgaatacataatgtgaataagcaataaattttaagaacacaaaataaattccatttgtgtctaaatatttcactctaaataggtgctcagctataaaaatccagtgtatggtggttttattcaaccataaaatctacaatatgctctaaaaggaaaaatggttacagtttgtgcatctaaaatgcatccttagtaaaaattcataaaactgcaacctaggagacttaacaacagagtaaaatcaatggagtaaaaaatacttcttgagaaatttcagtgttttgcagtatagaagaaacagtcctaaggcttaacaaaatacttttaaaaatttctaatgtactgatctgttgaaacaaaaaggaagaatttcagaaaggccaaaaacaaagtgaaagcagaaactaatagataatcaagcatcaaagtttggttacatcctcaaggtctctgccaaattctgaaaactatgagattcttttgtgaaaggtgttcagagaggacagaaacccctacataaatatagaaccacaaaataaataatcttgccacaaaaaataagataacaagcaaattcgctggttttgaatttggcacttggttaagaaaaaataaatacactttcctaagaatccctaaccacaagctgaacctcccatgaatttacaatctaagtttacactactgtgtcatacaaaacagcaagccaagaatttcatttaacattttccaggtgtggtggtgctccctgatgtctgaaataacaaaagaaagctttctctggagtcaaatgatttcaacccagggctgaaatatttctcatatacaaaattttgggtaaaacgagccgctctaacttataaacaggaaaaaaggcaccattaatgagagtcatgtaaaaaaaaaaaaacctgtagaaacaagaccacaaatacttcacttcttagaattatctccattggatgctaaatacatctattaatagtatgagaaaataaagtaaaaattaaaaatataaattaggaataaaagactataaaagttggtacgtatattttaaaaaatctaatagaatttttaaaataatacataacaattgaaattaataataaaatgattaaacggattagacacagtatattagaactggtaaactgggaagcagacttaaataagtcatcctaattgaaggacagataaacaaagacagagggaatatgaaaaacttaagatattctgaaggtagtgtaagaaggtctaataacaatgtaactgaattttagatgaagataataggagagaatggagaagcaaatatactcgaagatataataacaagactttccaaaactgttgaaagacataaaccctaaaatctggaaaggaatataaattgaaaacaatgtaaataaaaataaatccattcctggacacatggcagtaaacctaaaaaatgccagaccataacaagattttaaagcagaataaaaaacaaaaagaaaagaaagaacaggtcgcttacagactaatagtgattagaatgatgactgacttctaaataatagtaaaggcaccatgaaatcatgtctccgagtgctgagaagaaaaaaatgtatatcaaaatagaagtatatattcaattttattgttgaaaaccaaaaagaaatcaataaaatttctgacaaatgcccaaggagagtttaccacgaacacacactatctaaaataataacaaatatttttaaggctgaaggaaatgttgcccaatgagagctttgcaatgcagtaagaaatggtgataaatacatggcttaatattttggtaactctgcaaaaatacatataggggaaaagcaatatgggatggaaatgaagatgcttttcaacatattgtatcccaatatacccatcataaattaaaaatattctaagtaaaaaaaaaaaattaaatgctggcaacacagcagacagtccccaacttacgatggtttgacttaccatttttttactttacaatggtgcaaaagcaatctttgggtttggatcggttattgatttcaatagaaaccataaccccatcacaagacaagaaactcctctatttatgatagagttacatcttgataaccattgtaaagtaaaaaaaatcatatgtcaaaccattgtatgtcagaaaccatctgtagagagaaaaatagcactgacactgaaagggggtgatggtcattcaaacattcttaaatccttgtatagcttgaaaagatgggtacacatctctattaatcatagatttcattagtaataaatggtaaggtataagggtaactagtaggagaatacaaattgagtgtagattttccaaaaaagtagaggaaaaaaatggaataacaaaagaaaacctaaagaacagcaagaatgagttttaaagaatagaatacaaggactaagaaaaagcacaaataatatagaaaaaaattcaaattaagttgtcctcagtttaaaatagcctgttacaaaatgttgtatataagcttcacagttccacaaagcaaaaacctatagcagccataaaaaataaaaactaagcacaccaataaaaattaacgtaatagcagagaaagaaagaaaaagaggaagaaaggaacaaaagttctataaaacaaccagaaaacaattgttttaaatgacagtagtttttatctatcaataagtattttgaattgaaatggattaaattatccaatgcaatcaaagcataccaataaaaattaacctaatagtagaggaagaaagaaaaagaggaagaaaggaacaaaagatctataaaacaaccagaaaataattgttttaaatgacaatagtaagtttttatctatcaataattattttgaatttaaatggattaaattatccaatcaaaggcataaagtagccgaaggaataaaccaaaagttaagtacatgcagcctacctaccacagactcacttcatctttgaggaaacacaggataaatattaaagatggaaaaatattttccacaaatataaatcaaaagacagcatagggagctaaatctataccaaataaaatagactttaagtcgaaaactgtaaaaagaagaaaaggttattctagtataaaaatggctcaattcatcaggagaatataacaattatatatatgtacccaaaatgaaagcatttaaacctataaagcaaatattaacagatttgaaggaaggtagattttaatacaatcatagtaggaaactggccaggcatggtgactcatgcctgcaatccaagcactttgggaggccgaggcgggctggatcacttgaggtcaggagttcaagaccagcctgaccaacacaatgaaaccccgtttctactaaacacaatacaaaaattcgccgggtgccactgtgctgtaatcccagctactcaggaagctgtggctggagaacctcttgaacctggaagccagaggttgcagtgaaccaagatcatgccactacactcaagcctgggtgacagagcaagactcagtctcaaacaaacaaacaaacaaataataatactactaggaaacttcaatacacattttcagcaatggacagacagatcatccagacagaaaatcaataatgaaacatccaaattaaagtatatgttaggtcaaatggatataaaagacatatatagaatgttccacccaactgcagcagaatacacatttttctcaagaattaatgaaatattctgctggacagatcatatgttacgtcccaaaagaagtcttcagagatgttcaaaatttaaaatcatttcaagttcttttcctgaccacagtggtatgactagaaatcaataacaggagaaatcctggaaaattcacaagtatgtggaaattaaacaacatgctcccgaacaaccagtgggtcaaataaaaaactaaaaggcaaattttaaaatatcttgagacttacaaaaaatggaaacacaacatacaaaaacttctgggatgctgcaatagcagttctaaaagggatgtttatagcaataaaggctgacatcaaacaagaagaaagatctcaaataacctgacattatacctaaagaatccagggggaaaaaaaatcaaactaagcccaaagttaaagaaggaaggaaataaaagtcagagaagaaataaatgaaaaagagaccagaaaaataatagagaagatcaaataaaccaagaattggttttttgaaaagataaacaaaactgacaaacatttagctaggttaacaaagaaaaaaagaaagaggactcaaataaaatcagaagtgacagaggaatcacacttaacaactgataccacagaaatacaaaggatcatagagtctactatgaacaattatacactaacaaattgaacaactaagaagaaacaaattcctagcagcatacatgtcccaagactaaatcatgaggaaagagaaaatctgagcagaccaataataagaagattgaatcagcaattaaacatttttcatcaaaaaaaaaaaaaaaaaaaaaagcccaggacctgatggtttcactggtgaattctaccaaagatttaaagaattcacactagttcctcttaaactcttccaaaacactgaattggagagaacacttccaaactcattttatacagcaatcactacccagatatgaaaaccaaacaaggatactgcaagaaaagaaaattacagacaaatatccctgaggaacatagatgcaaaaatccttaccaaatactagcaaaccaaattcaatggcacattaaaaagatcatataccagaaatccctgatgaacctagatgcaaaaatccttaacaaatactagcaaaccaaatccaacagcacattaaaacagcacatatatcacaatcaagtaaaatttatccctaggatgcaacaatggctcaacatacacaaatcaataaatgtgatataccacattaacaacctgaaagacaaaaatcatataattctttcatagatgcaaaaatgaagcatttgacgaaattcaacatcctttcatggtaaaaatgctcaacaaattaggtatagatgataataaaggccttaaatgacaaactcacagctaatattatactcaacagtgaaaagctgagagcttatcctttagaaacaagagaaagatgcccactcttgctgcttctattctatttttataagggtgtgctatttagtgtattgtggctctgacataaggatggacagaatggcaatgccagagacagacccagtactatatggaaagatggtgagctgtgtcaattagagggaaaaaatggtcctggggcaactaattacccatctgaggaaatcatcagtttgaaacccactctcaatccaaaacaattccagatgaattaaattcttttttgtttttattttttttatttttttttttattattatcatacttttaagttttagggtacatgtgcacaatgtgcaggttagttacatatgtatacatgtgacatgctggtgcgctgcacccactaactcgtcatctagcattaggtatatctcccaatgctatccctcccccctccccccaccccacaacagtccccagagtgtgatgttccccttcctgtgtccatgggttctcattgttcaattcccacctatgagtgagaatatgcggtgtttggttttttgttcttgcgatactttactgagaatgatgatttccaatttcatccatgtccctacaaaggacatgaactcatcattttttatggctgcatagtatttcatggtgtatatgtgccacattttcttaatccactctatcattgttggacatttgggttggttccaagtctttgctattgtcaataatgctgcaataaacatacgtgtgcatgtgtctttatagcagcatgatttatagtcctttgggtatatacctagtaatgggatggctgggtcaaatggtatttctagttctagatccctgaggaatcgccacactgacttccacaatggttgaactagtttacagtcccaccaacagtgtagaagtgttcctatttctccacatcctctccagcacctgttgtttcctgactttttaatgattgccattctaactggtgtgagatggtatctcattgtggttttgatttgcatttttctgatggcaagtgatggtgagcattttttcatgtgttttttggctgcataaatgtcttcttttgagaagtgtctgttcatgtcctttgcccactttttgatggggttgtttgtttttttcttgtaaatttgtttgagttcattgcagattctggatattagccctttgtcagatgagtaggttgtgaaaattttctcccattttgtaggttgcctgttcactctgatagtagtttgttttgctgtgcagaagctctttagtttaattagatcccatttgtcaattttggcttttgttgccattgcttttggtgttttagacacgaagtccttgcccatgcctatgtcctgaatggtaatgcctaggttttcttctagggtttttatggttttagatctaaagtttaagtctttaatccatcttgaattgatttttgtataaggtgtaaggaagggttccagtttcagcttcctacatatggctagccagttttcccagcaccatttattaaatagggaatcctttccccattgcttgtttttctcaggtttatcaaagatcagatagttgtagatatgcggcattatttctgagggctctgttctgttccattgatctatatctctgttttggtaccagtaccatgctgttttggttactgtagccttgtagtatagtttgaagtcaggtagtgtgatgcctccagctttgttcttttggcttaggattgacttggctatgtgggctcttttttggttccatatgaactttaaagtagctttttccaattctgtgaagaaagtcattggtagcttgatggggatggcattgaatctgtaaattaccttgtgcagtatggccattttcacgatattgattcttcccacccatgagcatggaatgttcttccatttgtttgtatcctcttttatttccttgagcagtcgtctgtagttctccttgaagaggtccttcacatcccttgtaagttggattcctaggtattttattctcttggaagcaattgtgaatgggagttcactcatgatttggctctctgtttgtctgttgttggtgtataagaatgcttgtgatttttgtacactgattttgtatcctgagactttgttgaagttgcttatcagcttaaggagattttgggctgagacagtggggttttctagatatacaatcatgtcgtctgcaaacagggacaatttgacttcctcttttcctaattgaataccctttatttccttctcttgcctaattgccctggccagaacttccaacactatgttgaataggactggtgagagagggcatccctgtcttgtgccagttttcaaagggaatgcttccagtttttgcccattcagtatgatattggctgtgggtttgtcatagatagctcttattattttgaaatatgtcccatcaatacttaatttattgagagtttttagcatgaagggttgttgaattttgtcaaaggccttttctgcaactattgagataatcatgtggtttttgtctttggttctgtttacatgctggattacatttattgatttgcatatattgaaccagccttgcatcccagggatgaagcccacttgatcatggtggataagctttttgatgtgctgctggattcgatttgccagtattttattgaggatttttgcatcaatgttcatcaaggatattggtctaaaattctcttttttggttatgtctctgcccagcttgaattaaatttaaagtgaaaagcaaaattttaaaactttcaggaaaaaagtttcaccctaccttacagtagggtgagattatttttaaaaacacgacacaaaatgtaaactatgaaagatgataataaattctactacataccagtttaaagagtgaaaagacaaaccagagacaacagaaggctacttacactaataaatgactatttgcaaactcccattactaaaaagtgaaaaacaaataacataatagaaaattttaaatagtctataaaaaataaaaaggtgatcaatctcattagcaatttggtaaatgcaatttaattatgaaataccattatatataactactaacttctaaaaaaattaaagctgtccaatactaaccttggatgaccctgtgaatcaatccaagctctcaacaattattagtaattattaggagtgcggaaaatggtgcaccaactttagaaaagtttttccaaatgttttcttacgtttttttttgttagtttttttttgttgttgttgtttttaactaacaatcttacttgtatatgtttccaacatttacaaattaaattatcggtattttcataccctatagcccagagttcttttctgaagaagctttcatgtatatgtatcaggggccatgcatgagaatgttttctactgtttataaagactagaagcaaacaaataccaatcaaaaacagaatggataaatcaaatgaggcatatttgattcaatacagtttaacactgaaaatgaataagccacaggaaatagcttcagcaaggactgacctaaaaaaaatatttagcaaataaaatccacaaagaatacattcagtatgactcaactgtacataattcaactataagcaaaactaaaaatatatggcttatgggtaccaacacaggtggtaaaagtataagaaaaaacagggcaaaattaagccaaaattcaggaacctctttgggtggactggttgtgagactggcaaggggcacaccacccctaaattacctgcaatgttttattttttcagctgggaagtgggtgcattgttttcacttaggttcttaagtttaagtggtagatcattgggtcttacatattccataacaaaatttttttaaattacaaagagaaataaacaagaaggactcagctgcacttcttgatgacatgccctttctttagacaccctgggaaaactcaattattgtacatcaacagcttttgcctgaaagtagaaagcctagaaaggagataattgcctctccactatctgtgattgggaaactatagcccgctgggaaaacccaggtgcgcagtgatgccaagagatgtcctatttttttccaagttttaacacaagagaatggtgtttgcactcccttcgatttattctacttcaatgtacattttccagaaaaaaaaattgaaaaaaatcacaaaacatggctgttggaaaatttgcagttaactagttctctaatatgttgatgttttaacatgatgccttacttcacactgtaaaaaatgctggtctctaaaggacaggggaatgttgttatggaaagaaataatggaaaatccagtcttgctattttctaaaagcaaaggagcttcttcccagaagagcccagcaaatgtctcctgggtttcaactagttccagggccctgaaaccaggattgtggtcagacaactgagatatattaatgggcttaatctaggagccagatggatttgtcctctcccaaagtgcagaggtattaatatgttgctgaagttgtggaagctcaaaaaagctgggataaatttttttttttttttttttttgagacagagtctggctctgtcgcctaggctggaatgcagtggcacgatctcggctcactgcaagctctgcctcccggattcactccattctcctgcctcagcctcccaaatagctgggactacaggggcccgccaccacgcctggctaattttttgtatttttagtagagatggggtttcaccatgttagccaggatggtctcgatctcctgaccttgtgatctgcccgcctcagcctcccaaagtgctgggaattacaggcgtgagccccgcgatcggccaagctgggataacatttatcaaaagaaagaggcatggccaagggcggtggctcacgcctgtaatcccagcactttggggggccaaggtgggtggatcacctgaggtcaggagttcgagaccaggctggccaacatggtgaaactccatctctactaaaaatacaaaaatttagctgggtgtggtggtgggcacctgtaatcccagctactcagaagactgaggcaggagaatcacttgaacccggaggtggaggttgcagtgagctgagatagcgccattgcactccagcctgggcaacaagagcaaaacgctgtcaaaaaaaaaaaaaaagaaaaagaaaaagaaagaaagaaaagaaaagaaagaggcagatagatagaaaagaaaaaaaattgacaactactcatttttagggtttccataggctgtttctttctctcccatacctctcagagataattaaataatttcattattgtaagtccatgaagttgttcaaaatgagttagctgccaaaatttaaaatcatttaattaagatggctaaaagacagaaagaaaattttataaattggagtttgggatcctgaataatccaagctgattatctgccattgctagtgaaaaggcttttcttagaaattccatcaatatttctactaaaataatgccttaatttattttgggcagcactgggccaattatctccaggcatgtttttctccctatgcctgtcattttgtggcattacattaaattgtgtttaaaaatattccataaataatgaattattacaaaaataatttattactcacttaaaagctataaaatattaaatataaaacttaaggacaaagaagtaatttctaattcacattgcttacacaaaataataaggcctgcatcttctgttacactatggaaaagaaaatatttcacttatttcctttcaggctccaaagggcagaaagaagagtgaaaactctttaatcttcaacccccctggactagcaataactaataggaaccccctgaaagtgacatcaaaaaaagtccggaggccagagtgccagaacttctgccaagctaattattctcatggtattgaaaaatcactctcactcttgtgttgtaaaagtgggacaatcgcaatggacaattcctaatgttcttcgtggactggtagctcacatggggctttattactccccactggaacaataatgagagttcgtggtctcatggagaacctttccaccccagtcatagaagaatgaaataacttccttagtgaatttcttctatgtattctggttacccgttggtctaccatcattttatatctatggatacattaatgctatgaccacacaacacttttatgaattcgtattgggctacatattaacattgatatcacttaaaagatagtacagccatcagcactatgttctgtgctgaatttcccaccatttctctttcaccagtgtaaagaagtatacatttgtatctatagggaggtacaaacagtttggggctctggatccttagaaaaaaacaaacaaaaaaccacttctgtactttcttactggactacaaaattttctgcccatattatatctgatcaatcaaagaaatgaactaaattttttctcttgaatatctcattccctattactcataatagccacatgatatttactgttgcatatgattttctatgaatgtccttcagtcaaatagtccagttacttaaaatatagtaagcaagagaaaaagtcatttttgagggcacaattgtgttttctgaattacattaaaataatcatttagaaggaaatatgcctctagcaagtttgatcaagataaacacaaaatgctccatttcattgaaatttatattctctcaacactgaattttattatatttaaaagttttttagcatatataagtgtatagaaatcctagtatctatgttcacaaataaaatgtaattgaataataaatcaaaattaaacttttaataaatagtattatattccattagaagttgcaacgtattatctaaatgtaacaatgatttatttgtattaaggttcatgtgatgcaaacataagtcagattatagaaatctgaagttagatgtctctaagtcttccagaggaactttaaaacaatgccaagtatttgaaaaatattttgtaatatatgtcaggtgacacacttcccccatctttcctagaaaaagaaagaagaccagttgcaaaggctcacgtctgtaatctcagcactttgggaggccgaggtgggtggatcgcctgaggttagaagttcgagaccagcctgactaacatggagaaatactgtctctactaaaaatacaaaattagccaagcatagtggcacatgcctgtaatcccagctacttgggaggctgaggcaggagaatcatgtgaacctgggaggtggaggaggttgggtgagctgagatcgcaccactgcactcctgcctgggcaacaagagcaaaactccatctcaaaaaaaagagaagaaatagtgtgcttttctataagtactttctctttttttgaagaatgcggaccaatgctgaacacggaatcaagcttgggataagaatagctagaggacaaaatgctggtgtgtgggttattatgcaagtaagatgccttggatctccgtctcatataaggtggaaactctccctccccaccctacatcttgccactctcatgaattccaggatagttggtagtttcctaatcaagagcttacttatcgaaaatactccatggcttttgtagaagcttctgtttgacaattcctcactacacattggttctttaccattacaaagcaccgcggaggtaagttcattatgcacagcagatgtgtagggcacatttgggataatggagaggggttagggcatggcaagcacagaaaacaacttgaaataagatactagatacaactgtgctgaaactccaccaaccagccccagcaagaagaatgtcattccggtgatgggtctccatagaacctatacattctaccacactagtgagtctcctctgtagtctgtagtcttccaccgtagacgacgttgcacaagttgctctctgaatttacaaatgccttttattttatgtgcagaacagctgtttctcttctgttgtgccctgctcttgctaaatatgcattttgaggaagaggcaatgttgaaagaagctaagaggggttgaaaattcatgtttcaaaccaaatggctcaagatggtgcacatctgtgttttcttctgaccaacttacatccctctttttccaataatggcaccccaattttgctttgagaagctatccacgccccttgaataatatgttggtggggttgttaaagagtttttctttcccaagccaagaaatgagcaaggctttgaaactatattctcttaataccttttcactaaaattttagtcttgaacagactgaaacaagcacataaaatgcccagaattcatcaccttaatggcatcttgaagacactatgtattaatttgttatagccagacctgcataaaggctctggtttacttgaaagtcaatgtctcagaattttcttcagtgctgtgagctatcctgtctcatcaataaatttctttattgcttatgtcatgcaccaccagtttctattgctgacaaccaaattaaactaacttatatcatggggatattttcctaacagagctccatctgctttgaaattaattgttgctactgagtatgtgaaataaaccattataaattgctttttatatgtcttcctaatatttgtttcataaaatttatttttaaaataactataaaattattttttcctgctgaagctatccttgaaaacttttaggaagaactctgaggcatgttctttcttacaattctcataatgcttatgaactaaggcagagatcaccaacattcttaacgtcaaaacattctaccattttactttctcaggtcattgcatttgaaaaggtccatacagatcatttaatccaaactcagcagcccaaaaggaattctttccatattatacctaacagatggttacctggtctctttttaaacacttgttagcaggaagctattcgtttatttgaccaacccattacaattttataagaatttatcatgagaatgttcatccttgtgttgaaaaagaatgtgacttccaaccttattctttctcccaatgtctcttttcctcttcatatgcatccaggaacttctgcctataaattttatttctgcataagtgatcactggcatctggctacccttcaaagattttaagatgactgtccaatttcatggaacatatccctgttctcctaaaagaattccaagcaaatcattgaaccatatgaaatctataggtcaaaatctataggttgttttgaaattttctgaaggattcttaaagtgattggagacacagggtgtcaaaaatcctaaatgatatttttaaaaaattagctctgaaaaaaacaagtaaggattagttgtttataaaatgttatggtggttcctttaaaacaatcatttcttaagagtcagtgcacttaagattatctgaaaacaagttatcacttcaggctctcaaacaaagttgcttcttttgtgcagcagcagattaaaggtggcgtccttcagcagcaaagtctatgctgaagaccactggaaatgctcctcctttttaggaacccttccctcagaaattgatgacaatcacaagaaaccacataccttggcagaacctgtaagtgctgaaaaagtaaaatgctttgaacatttgccaggatttattattcatcaataaaatatattatttgctaattcatgccccaaaataattattcatgtctttaaaattttcaaagtaataaccataatatgcagaaagttgattcagagttcagtaagattttttaaatgcctaccatatatgtctctgacaagaggctcctcataccttattactaatttgacatacattttatatacaaatagttttacactagatttttagagctccaatgagatgcttttgctttttttaaacagtctatgttgccatttcaaattggcacattttttcacctaatagagattcctaacaagtaatatttatctctgaatatgtcattacttcaaatattactctctcttatattaaggtaacagtacgcaatgttgtacaaatgctttttatgtacaagtactttgacactagattttatgtacaaaggctgtattttatgtacaaatacttttacgcattttatgtacaaatattttaacactaattttttagagctctatggagatacttttgctttttctaaatattgcatattgccatttcaatctggcacatattttcacctaatacagatttttaagaagtaatagtcttctaaattgtctctgatagttcttacttcaaatattactttctttcatattaaggtaacattattacaacgattattaatgtagggctaagagtaaaacagcttgaattttcctctaggctctgccatttctattcctttctgtaccttaatttcctcatctgtaaagatagccattctaccaacctcactgggatgttgtgaggatttagagttaattccttgtagagtacttagaacagtatatggcaaataataagtgctcagtaaaaattagtgtttcatacctacatttcagaattaaaactttattatcagaaaataaatgttttgctttatattattttaaagtagatgttactcaaattctcttaaagaagggtaaaagccccaaatttgagcaaaatatgtgattcatcctgtaaattagcatcttttgaaaactaagttaacttgttaaaagctattgttatttattgggagaatgtaaaaaataaaactcagctactaataatagcttccacttctcgaacaccttttatattactgggactttgtcaaggatcttatattatatcttgattaatctttccattagcattatataactgatattttcatttccattttgcagatgaggaaaccaaggattagataatacagtttgatggggtttaagacatgttagcccaaaaatatggcaccttgacattggagactatagcagaagcaggaaggtcattctcaccttcccctcaaatttggtcctaaaatccaggaaggatttttctgaccttcccttgaagtgggtcataagaccctcattctagagtggcttccatattcccagaagaaagcaaaatcctatctctgaagaaacaggatacagaggagaatctgaaccaactggccctgctaagttctccccagtttatttccattagatcacactccatttttccaatcacactccatgctgcctcttcatcaaacctagcatataaactcaacttgacatgactaccagaaatagctggaaagagaaagaaagaatacgacaattacaattgcaagtaatatgacaatatgaggtcttcaatgaacagacaggatagtctcaaactcctcagtaagttttatattttattactttcatgaacatgaatgaacaacacataacacagcacagtgccttgcacaaacattcaagaggtgcctagacagactaacaggacctttcaatgcattcaattccaacatttgttaattgcccctaagcatagtaactgaaaggaatagtaagataataaatgagttctcaccacagagagcttgcaatgcattcactcactcactctacacatatttatttacatccttacatgttgaaggtaatgggaaccaaacatgaatgagtcaagaatcatgcattgaagaaactcacagtatttcagaagaatttaggacacatatacacaagcaattagaatagaaaatagaaaaagtatttcctaagaacacagaggaaacagtgtttgagagattaaagatgggtacatggaaaaattgattatcattcttcagcctgcacagtgagatatacattttgtatacgttatatgcttcaaatgtttttaaataaatataatacatgggtagaatttataaacgtagagataagaaaaaaagctggttggtaattataaacagacaaacagcataagcacaacaatctgacagtcaactccaaaatatggaattacttggcccttttttagcactcttttctttgcctctcctatgtccacaccagaactgcaatttctagattgcagtacaatggtgaatggggatcataatcttcctgctagctgaccttcattttttgaatcctgcttccttttccaagtccattgatgaggtgaatgaagtccaagaatggctacgttttcagaatttacatgggtattttaagaaaacctcattccaaaacccaaatatgtccctgctttatctttatgagactacatatttcaacaggacacagtgttcatgaagtcattctattattaaatacatgtgttctatgttatgctgaaattgataacccactacatcacctcccaaagaaggttgtgtaaacttgtcacaaaaaagagaattatttctgtaatttttccattgagaaaaccaaggctgagaaaggttgtataacttatcatattggtaataaatagaataaagattcaaaaaaaaaaagaggttctaaaactgcactgcatatttggatgcaattttggtttacggttttaattcaggaaacaatatcaagacaataggaaggatgtttaaaacctacccacatatacttacttatttgtcactttgtttgtttctaggcactaactctgcttccttacaacatttcaagtacctcccaataccattgctctattatccaaatagagggttggcaaattgcttctgtaaaggaccagtacatgttttaggctttgcaggttatacaatctttaccacaattactcaactctgctggcatagcacaaaagcagtcataggcaatatggaaattagtgtggctatattccaataaaacttatgtatggacattaaaatttaaatttcatataattttcacaagtaacaatattattcttcttgtaacttttatcaaccatttataaacataaaaatcgttccaagtatacaggccttacaagaacaggtggtgggccagatttggcccatttgcttacctctgtcctaaatcataaccacgattcttagaaaattcttttttccaaaagcataagagcagatttttttaagtgtttacctacttttcttgctttttttcttgcaaaaggaagttacataggagcttgacacttcttagtaataaaatttacttttccgagcaccttatatcagtgatgcaaggtgaaaaacttaaccctttcgattcgacatgtagcttggcaccagactcactaactgcctaagttagttaactggattaactaaattagacagcttccccagtacagtgttttttgtcttctagctttgtgataactcattcgactttgaaatatcttagtagctggattggctaaatgttctgactcacaaaatattttagtttttagtaagtatctgttcaaagattcttcccaactgcagtcttctcctcaataacagtcatattaaatatgccctagtgcttatacgtgattgcctctgtttttttgtctgttttgttttgtttttactgctaaaagatttgatcagctaactcagtctcttactgagacttaatgtcatataatatggatgcttcaatattatacttattttaattttcctattgtgctcttttcaaaacactcatagatctatagtttctttttaagctctaatagaaatttctattcttgtccatgacactgggatgaaatttgagatactaatttccatgcacagaaccaacattaatgttctaatttgtaacataaattcaattcttgccaataatttgcatatttcagagagataacatacagacagatatagatacacatatagaaagataaaggcatttacacatatatggcaaggggatatacacaaagagagatagagaatgactagagttcacagagtacagctagacttcctgagttcaaatcccagctctgcttcttcctatctctgatctttaacaagtcatctaacaagtctgtctctgtttcttcctgtgaaatggagacagtaatggacatgcacgtcataggattgctgcgagaatgaagtgattaaagaatgcttactagtatagcatacattcaataagtgttggttattattatgatgcaccagctacctgcatttgtatttgactgatttacagtgaccagatctcaacttatactagcttgaggatttatttgttaccccaaatggcaagtccaaggattcaggcgatcctattttctggaggctcaatcagtggggccaagggctccacctgtcctgggttttccatcaggctcccaccatggcatggataaaatggtaagtggcaaccccagatccctatacaactgagcaatacctgttttttccatgtactctggcagaaagtagccaaggagaacactggcccagtgcaaagcatatgccaatctatgttggatagagaaggggagatgagtcaaccccacctaatgtattcacaaccaagaagatgagaaaagagatcctgggtagacaggaacaacagataagcaccgttattcacaattctctttatagacattaccctttgtttattctgcaggtgagccagtttggccttgtctctgttgcaaaatccacaggtcctgatgtttcagttcatcaccttctataaccaccaaagcggtagtaacagaagtaataccttttttccatacttgatctccattttataataaaagcaccctgacaatctcaggttagtaaaatgcaatagttgaaatacactcagtgctgcactttttacatgtcgctatcccctaggggtatttcaaaagaagaccagactagcccagtaattaaatgcccccaagcatacgtggtaaagccatgttatggcagatgtacttttaacatcacacaaggatgtctagcagcacctagtgaaaaaaaacacacattttcttgtttcaactctaccacttattttagaaactagacaaatcaagcactaagtttctatatttctgaaataaagtctgaaatatccacttaaccaattacgcaggaatattgtgaggggattaaatgaaatatcacacgcagaagtacttcatatgtgtaacgaaaatacttagcaatattatctgtaataattaaattgttttttgtttcctaatccttctcttaatcacaaaaatgatttctttctttagtctcaggtttcttttgtgctcttagaatagctgtcacttgacaccctgttgtcatcccttacacaaaatatttcacctttttttatcttttctgacactacatttactcactttctctgcaatttttatgctcatctctatgttctctctttccctgtctcatttccttctttgtctctctttgctcagttttatttttttaattggtcattatcccttcactagcaacaaaagcccgcctttcctttttcctgtgtggcagaaccattgcaacacgctggttggaatgttcagatcttgacttcatcttggctatttgactgtattctgtcaattcagaatcactgcagaggagcttctgagtctggcaccattctgaaggtttaacattgtgggaagtctcactccagataattaaaaaggttgaacttctcagcagctcagatatttgagtagcctctcaagttccacttaatgaattaattctctgtgcttcttgaaaaataaaccactcaccctgaaaagcccatggcaccacctgccttcagcataaggattcaacatatgtgggtgtttgggaggactgttttagactgaccttggaactggaaataagaggcagcagctgaaagcagacagaacacacagcttcataatcaggcagtgctgaggtcaaattctggctccgtcgctcacccagctgtgtgacctccagcaagttatttaggtgttctgagtgtcagatgactaattcataaaatggacacattaacacctttctcatggaaatttatgaagacaaaaagcactcaacaagcagaatccatcatcattctcattagcatttttgttatttaaaaaatctaaacattgctctaaaatatccataaaggcctaattctttcaacagatgttcttgatcatgatttttgttatttaaaaaatctaaacgttgctctaaaatatccctaagggcctaattctctcaagagaggttcttgatcatcaccgcaggtaaacattatgggttagatttcagatggcacccacctcgggagcacgattattgaactcaatccttaaattatttctggagaatatgagtataatccagaacatgcaatcaggttgtggctgggaaaatatgttcactctggtagcaagtatcacagggtgctaagaatacatgtgggttctaaaaatgaatgggacctaaggagatactgccacaagagaaaagggttactttgtgatatacatatatgtgtgtgtgtgtgtgtgtgtgtgtgtgtgtgttttcctctaaaaaatacattgtgaaataggtgattggcacatgccaaaccttagttgtatttttaccatttgttggaatcattccttctaagagaaacaaaataaaaggaatcactccgtctacctgccggtctcagttcatttgcaatgaaaatattcatttctaatgaatgcaatattttatgacatagaacaggattaattctgttgtgcaatcctgagactttactctgtattctaatccactctattcttttagctgtgcaaaaagaataggagagtgcttatggcaatatcaattatgcacatcttgaaagggggcattataaagagagaacattaaggtgaaccactgtgttagcacgtaattcctgtgataagtggctttttttctaatctaatggcatctctttctattataagagtggatctttgcaatctgcaaatcagtctggacatcagagaagaaagtcacctaaaaacaaaacaattattgaaattttgcctcatagagactgatcagcagcaaaaatcagctctaatcagtgtatgctcacatcgtcccagcagaaaaaaatcaatccaaaatattgatcatcatgttttattttgctgtcagagacaactagtaccagatacgacagtacttatacaaaatgatggcaataattacctgaatttatatccaatttagatcattattaaaattattttaacaatataaagaaagaatactagatgtgaaaattctaagggagtagatgctgctcttcaataatctttatgcacagcaaaagaattcagtaattcccaagttgataatactaaattaattacatattatcaaattttgataaatgtgtgtgtgtctgtgtgtctgtgtgtgtgtgtgttcctattcactacacaaataagacttaggccttcagggcataagtaatgtaaatgtaactataatggcaaagcttatttgctaaaaaagaaaaatgggcctagaacttacatatgctgaattccatccagtattcctacaacacatttcaactggtgaaaatagtaagtccaagacagagtaactgaaacagagttattttgtgagataaacagcaaaatctacaaacctcaaataactttaaaagctaaattaaaaaaaaaatttaaggacattatagagatctttatatttggtgctgtttaggacatataaaataatatcatcccgaccaccaataatacagatgaaagctatcagtcagggtcctcatacttcagcaactgagagacactaatgaaaaatgtatgttttattggttactaacctgggtgacacagtggccttgttgtagagccctacaaatattcaaatcaatgctatgatttgaatatttgtcgcctccaaaactcatgttgaaacttaattcctgggttaatggtttaatgggttttaatggcatgggaccagtggcttcataagaagaggaagagagaactaagctaacatgctcagcccctcaccgtgtgatgccctgtgtcacctcgggactctacagagagtccctaccagcaagaagtcccttcaaccttggacttttcaacctccataactgtaagaaataaattccttttctttataaactgcccagtttcaagtattttgttatgaaccacagaaaacaaaaaaagctcatttaatttcaattacatgattttttttcagttttaaacttttattgtagtacaaaataagattttttacatcagtttgatcccgataagatcatcttgaaactggagatggtcccattcacctcagctcactgactccacgctcaggcttgctgtggagctcatgccttttaacccaaacactacatattccctcattaaccgtgcactcaacatttgtgcaagattcaaaactgattgttaggcatgcataaataaagcagacaaagtctctaatcatcataaagcttagagtcttgcggggcagactaacacagaacataatgacataggaaaaaaaacactaaaagcactgtgaaagaacacgataacctagctgtggtaaagggaggagtaacactcaagtttctaaaacaatgtcaagaaaactgaaataaggttgaaatatgctgatatttttaactttcgatcccaccctagcagacagaagagagccacaggcattagtgcagggagggaggagaggagaggggttaagctagggttgagagtccctcaggaaggcattcaaatcccacttacacagatgagaaaaccaaggctcagaaaggctttctgaaaatccaacactgcatgttctcattcataagggggagctaaataatgtatacaggggagctaaataagggagagctaaataatgtggatgtagagtgtggaacaatcacactagagactaagaagggttggaggttggaaggggttgagggatgagaaattacttaatgggtacaatgtacattatgcaagtgatggtcactctaaaagcccagacttcccctaaagcaatagatccatgaagccaaactgcactttaccccttaattttatgcaagtgtttaaaaattaaaatgaaaaaaatacaaacacgggcttgtgtgattccatagcacatagctttatcccaaggtaagggggcacaccttaagacagcccccactttggtgaaggctgctagtttctgggaagctagcaaaacatttctccaaccaaattgcggaaaagctatatataccacgtacactaataataaaaaattgccaacatgaatctccaagctttagttttttaaattgtcagatgggtgcataggtgaaggagacaagaaacactggccaggggagactctcaagatactggaaccctcgtctcagttctgtcttaataaaatttttgcttttgagttaattgtttcatgcctatatgctgtctatggtaccctcttagtataagaagtctagacataaaaaacctctacaattcaattaatatgtgtgtgtgtgtgtgtgtgtgtgtgtgtgtgtgtgtgttcacagattatagagattcacagctgacaaaaaataacttctgggagataattttctagtgggaaagaaacatcaacaattcattacaaaccaataaggtcactgtcaagataagtgtgtggggacctccaaggaagctctctattttactaaagtccagagagtctgtcccgggaaggcttccagactgcagctcattggtttattcagccagtgtgtactgaatgctttttataagctttgtcctcattgaggttctggaaataaatattgtcaataaagcatggcccctgccttccatgaggcaactcacaatctctgctaaaccccagggaaagggtggttcagctactttttaggaagaattctggaagaactgagaatgtttacctcttctaacagtcttctctcattcacgtttaatttaattagaaatggtctaaattgaacttcggcagagcaaagcaacaaaacaacctgagaaactctatttgttaatagggtagatttaagtcgatgttctctaacacagtaaacataagcttaaatgttccctaattagagatagtgtgaacccagcagagaataccaagtcctatggggtgagcccacagagtcacatgtgctcagagtcacatcagtaactcagcatcatacatgacacattcaaactcactctgcatgcaactggtctgtagatttatttttatttactgattttctgcattttctattcatatttttaagtagaattctaacagttttactgtagacttttgccttacctcagttggtacacaattccaaaattcacctatctcactaaaacagtgaagaaccatgatttccttactgttacaattccccacaaaaaacaaaaatgaatcaggtcattgttacttaagtgataagtaccttagagaaagctttttaacatacaatcacagatcccttgttgaagaacacttttgctaacagttttgccttgctgaattaggaaaaaacattctttcaaggacagtagtaagattgaccaggtttctttgtactctctatatttgaagaaattgagccagttcagtccaagtcacttaaatcctgagtcttgattgcctaatttgtaaaactgttcagcttcctgccagactcatagggttgtagtggggagttcagtaacataaggcagcatttggaaagttgtaagaaaaaacaaaaatgattatgaagtcactttaaaatatagggctctaatattttactgtcaatcactttcaaagcagtgggacattgtaggcaaaacaccggtctgggaaatgaaagacccaggagaactaagttttcatctgggtttatcagtggctgattgacctttgaataagtcatataatattttctgagcttgtttcttcctacttattagagaaactgactatattatttttaagtcccttttcatttatagaaatcagtgtttccatgatcatttgttaattcaattaacattttctgagcaccctcatgacccaatcacttcctaaaacctcacttcctatcacattacttattagggttcaacacatgaattggaaggatacaacagaaacattcagatcatgcaaaagttacacatcagaatctgaccagaatcaagaaaacattattaatccaccaggccataaacataggggaatatctgagaaaagctatctgtctagggtatccataagaaaacaaggttaagcatgaagataacaaaccttcaaggtaagaactagctgggctgccacaggcaagtcacttaacctccctggacctcagtttattcatctgtcaaataaagagtttggggtcatgtgccatccatggtcctttgaatagcatctaatgttgtcattaagtgctgctctgtgcaaggccttgagacgatagaagaaccatatgacccgggaatggtaataagttcagtgatcacacagcctaggttgctcagggcagtgtctatttatgcctgttgtcctcagtaactgttcatagccccaatagcactctgtcttcccaagtttcactctccaaagtgttccagtttgagtgcccacatataaccatcaccctagtaatcaggcatatacgcacaagctgataaggcaagatgataaaacggtaagtatcaagaaagggacagacataactgctcctgcactcagcagtgcaaaaattaacaatctgtttactggattttctaaggcttcatgaaggagttgagacagaatttaaacctacaagatgagatagctaaatggaggggattcggtacaacatatacaattatgttgaatgtcaaactgcttctcatcccacatattaattgcagagcagagtttttacttttttttccatcaatgttatatttaacttaatcatccccaaatctacattggtcttctccccttttgagtgtttatgaccccaattgcttaaattccccccagtgtacaggtgaagaatgacaaaggcattgcctatcctgtgtgaatctagtaaacctctgtctaccagactttgataattgtctgggctctacccttggcacaccattctttgtactctacatttgctctttgagaaataccagtcatctctaatgtttgctagaattgactcctaaaccatattctaagcgattgtgttgagccttgacatctcttttggaaaccaggcccttctttccaacaactggacatggccacttggatctccctatttcttctttggactctgaagctcaccctctctaagagtgctaatacaacatttgttctatttcatttctattagatacttaaatgtgtatctgccttgagagtttggactgtgttttaatcaatattggatcattagggccttttcttgtatctgacagtttccaatgaatactattgaatggaaatggctgttgattttcattccctgctctatcatttgcccctgccaactcttcttattcttgtctttgactagagatgacagatactcccaggattttaaaggtcatttaaacatcgtctttaagcaacagacagaatcttccccctacagggagttcaatggagagccgtctattgttcaattttcggtatcaagctaactcagaaagggaagaatcacccctgtatctccgctttcccatttttctagcatgacagtctacataagagtttttagtttatgactttgtctctctcagtcttctctcctgccagtgactgcagtctgacctccgttagcttttcttcaatctgttttacaaaatcactctggcattctattttcatctttgttttccagtgtctaaaccgctgaagctgtgacctttcaagcaaatgtagcaatggtaccagcgcatcctctgattgaaaaataaaaagtgagcccataggtagtataattattctgtgtgtgcaggagtggtgtctgcacttgcagaaggcagataattggatttcagattattgttaaaaatatgcacattccacctgagccctagcagtttcttttttctgggaccctagagaaacttgaaacttccattcttctataagttcttatccatatacaattggcttctgggtcctacctgttctatcccctggaagtcgctagcccactctttattcttcattttttctgtctccagaatgctttctactgctccagtactcgccaccattataatccatctggacagtctgaaactatcttcttgtttgcacccttgcccttcttccctccatcttccacacacttcctagaattaccacaagattctatctagttgggcttttccttcaaacttgtcaatgaaaccttttagcccacatacagtcttttaaaatttaaatcaattaacaacattgaaaaatcagaatatgtctgttaaaatgagagtttttacttaacagttctagcagttctaggccaccattcctatacagtcacaattagctggagctgactagtagctgcctcataaggaaaggacagaagctgttcctgttgccatggtctgtccccctcactattgttaacattttgacatcaccttgggtggggtcatttatcatggtgctgatatatcaccagaagacttcactcatttacaggctggctggttcctggagaccgtgtggactctactctatatcttattagatgtagggatgccagaataataactaataagtactcagagctacatttgagggataatcccaaatggggattaaatttatttgagggttcctgtagatgaatataaagttgtgagtggctctctttacagaaattttagtaaacatcttattgatgccagtggcagcccatctggagtggctgctgccatgatgccgcatgcggcgggagaggactggccggggctgccaccatggagtcagcaaaagccaggaacaggcggaagctccacccccttctgagttggcagggcaggagccttgcactccccaggtgcagctgtggcacccagctgtggctgcagacctgggcatgcctgtgcacttgggggctggaagtaggcaggagccccaccttcccgggcacacctacagctgcccaatctgtggctgtaaatctgagcatctctgcactctcaggagccctggaagccctccccttccactgcctggcctcttcctactccaagcacttgagggtgcctgctccttctgcctggcctttccccactccaagcgcccactccaatctcagagcaaagtggaggctgagcctgagtgctgtcacaacctggctaggtatgtgcactcttggggcagcactgacacaccagccccctgctgccttggactcctccagactttgggcaccgaggagcatgggatggaggccaagggcagctcagagctggcctgctggcaccactcagcacaaacagtcttggcatcatgaacagtggcaggaggcagataggctcctgggtggaaagacacaggtgcctggtgaagccccaccttcaagtggggaaaggcctgaagcctgggggcaaggctaccagttctgcagagtgggaacttatgttttttctgggcctacccatggccttacatgaaccaatcagcatacacttcctctcctttgaagtccatacaaaccccagaactcagccagattcaaaaagagatgacatgaccaccagctgcagaaaggagctacctacccccagggtctcctctctgctgagaactaaaaagagatcacaagatgatcagctgtggaaaggagctatgcatgccagggtctcctctgctgagagctgaaaagagatgacaggaccaccagctgtggagaggagctacccacaccagggtctcctctctgctgagagctgagaagatgatggaatgaccagttgtagacaggagctacccaccagggttttctctctgctgagaggtgagaagacaatggaaaaatggacctgtggagaggagctaaccactccagggtcacctctctgctgacagctgaacactcgtcaggacaccctgcctgaggaaaggagctacccactgtgggtctcctctgagctgttttataactcaataaagctcctctttgccttgctcactctccacttgtttgcatacttcattcttcctggctgcaggacaagaactcaggttctgctgaatggcagggctgaaagagctgtaacacaaaaagggctgaaacaacccccttgctcgccacattgcaggcaacagggagagaagggcagtggcccttcagggagcccagacttagctcccaagccagggctgtgacaccctctttggggttctgcagtttctggtctctccaagcttctgaatgccaccacattccccagtgccagctgtggaagctgcttgctgtacacctggtccagcagcagcctcacagggaggtggcacccgtgatggtgcctggagctgcccaccccaccgcagccagcatgcttggctgcgcacagtggctggaccccatgctcactcactcacacaaccctcaccacttcagtcacccttggcagatatgggatccaggctggtagcatgagctgagctcagcctgccaggtcaagagggcccagtgggcaagagcaaaactcaggcaaaggcgccactggccacagaagtttccagctggtgaagtgacaccccaaggatctcataacattatcaagttttgtcacggtcacttctataattggatattttcagtgtgaaagagaacaaagaagaaaaatggctaggaaaaagtttaatttcttgatagctctaagaagtgcttttcttgtcattttctggattgattactagcacaagataaaatgaaagtgtctcagctttctctgaaatgaaatttagcttaaaactctagtggcccaatttctgcctcatttcattccctaactctccatggagtttacatagaaattatggttatgcgatgaagaattcaactcaaaaggttcactgtaatattacaataaaaattacttttacaagcacattggcatttttaatatatttagtttataataaggtaccaccaaaataaagttaaaagcaaggtaacttgccatcactcctaattgtgtgtgctttttagacaaaattttaacacagcttaaaaattttctcataaatcaaaatcaattaatttcctttttaacagtatttaggaaatcctactgattactgttttaagacaacttattttcctaaagttattgtggctgttagctgaaaccacagtatcctaagatatactcatatagagtattaattgtttatagttcttaggctccaaatttagaaaacacaggaaatttagaaaaacaaacatgatgttataataaaactgtgtgggagtaaagaagagatgggaatctataggattatccaaccctcaaagcaaaatcagacacaaggaagatcctcgaaatcactgctcttagataagggaattttatcagacataggacataagaccaaaaagagtaactgtgagtaacaaacttcagccaaacataaataaacaatcttccagcaacttgccacaagttgctgaactagtcatccctatgcacacttggcaaagggcaagacatttccagattttttgtggaagcaggcagaatggtcgagagagacagacacttgacttcccttcatcgctgtcctgctatccttttgaggaccctttcacctggcttaactggcctgtaaggtattgttagactaaccacttcttaagaatagtgctctcgggtggatcacgaggtcaggagatcgagaccatcctggctaacacggagaaaccccgtctctactaaaaatacaaaaaaaaaaaaattagccggaaaaattagccgggcgtggtggtgggtgcctgtagtcccagctattcgggaggctgaggcaggagaatggcatgaacctgggaggcggagcttgcagtgagccgagatcgcgccactgcacttcagcctgggcgacagagcaagactccatttcaaaaaaaaaaaaggaatagtgctctcatttacctaaagaatcatgtcaaatggtctacttctgcaactagagagtacagctatcaattagtgtctgaatggagtttaaaaaattgattcagaagggagtggcggctcatgcctgtaatcccagcactttgggaagctgaggtgagaagatcgcttgagcccgggagttggagactagccaggcaacagagtgagacttatctctacaaataataacaattacaaaaactagctggtgatgctggtgcatgcctgtagtcccagctactcactacttgggaggctgaggtggaaggattgcttgagccctggaggtctaggctgtaatgagctgtgatggtgccactgcactccaggctggacaactgagagagacgctatctaaaaaacatcaactgattcaaaagggtattgaaccaaacataatttttaaatgcatgtatttatgatcaaggagaagatttgtcaataatttttgttttgttttgtttttttgagatgaagtctcactctgtcgcccaggctggagtgcagtggcacaatctcagctcactgcaacttctgcctcctgggttcaagcaattcttgtgcctcagcctcccaagtagctgagattacaggcatgtgccaccacacccggctgatttttgtatttttagtagagacagggtttcactatgttagccaggctggtctcgaactcctgacctcaagtgatccgcctgcctcagcctcccaaagtgctgggattacagacatgagccactgtgcctggccagatttgtcaagaatttagaagagtttaaaatgtttcatatttgagatgactataattttaaatgttatgacttttttcccatttttgctaaaagaatataattattttatctcacctaaatatgcttaaaaagaaatttgatacttgaacagtggaatttgaattctgagatctcttaaaacacttttaagataattggcttatcattagactcagatttctactgatactaaaaaaaaaaaatcagatataacattttgtttttaaaggacatttagagcccagatctcaacatggatgcttgtatacacaattgaagttatacacatagcctatgtagttgtatagatatacacgtgacataactatggctccaataatgtgctagtgtcacagtctacaaatattcattcttttattttgctaaatcttgaaactgattaatttcttcccttatagaaaattctgaaatttttttcttacccccaaaactgcctgttcctcccacccagtcaacagccactccattcaaaaactctcagtgctacaaatggcaactatattttccagagcagaacaaactattcaagaatatcaaaaatggggcagttgtcagatgtacatagatattaaagattgagtattttgtcatcaattattcaaggtgtaacatcctagaacttaactcatctcttcaataatttcacatgctcattctagcaaggcttttcatatttcaaatattacaaagtataacttatttccttaaagatgtttttcaagtataaccacacaatgggagttaacagaactcactggtttcaagggatatgaattttttggtaaatttatataataattcaatttaaaaagtcaaattaaaccttggagtcatctttgtgtgctctttaccactctgcatccaatctattaggaaatttcttcagctcaagctttaaaaatattcccaactttgggaggccaaggcaggtggatcacctgaagtcaggagttcgaaacctgcctggccaacatggtgaaaccccatctctattaaaaatacaaaaattagctaggcatggtggtttgttccttaaacccagctgcttgggaggctcaggcaggagaatcacttaagccgggacacaggaggcggaggttacagtgaaccgagatcatgccactgcactccagcctgggcgacagagtgagactccgtctcaaaaaaaaaaaaaaaaaaaatcccagcatctactttcactgctggcaccactattaaattgagtccatagcctctgtctcacacctggactcacacagtggccaccgaccattgttctttcttccaactattgttcttccttgattgacaaacatagccccagcaaacgcgggtcaggtcatgtcacttttctgctcaagaagtctttataacttatctcactcagagtaaaaccccatcttaaccacagcatgcttgatctggcccctatgctatgtcttctctcttttcctctcactgcctcccaccctcctccaagcctccttaaacatcttgctgctccttcactacagccagggataattccacctctgagcttttcatctgttcttccctttgctctgaagtctcctccccaagaagtagcctggaccatactctcacatcatccaggaccaaatatcacctcatcagcaaggtggccttgctggccatctaatctaaatttgcccctttcccatcactcactgttactttaggctgctttactttgtttctcagaaggaggtcagcatctatctagttagcatgcttagtgtccatccataggcaacagaaacagagggagaccacaggcaggacctcatcaattcttcaacaaatattgttatttatttcctcgtgccaggcatagtcctagatgctgacaatataactcagaataaaataaaattctctgttctaagggagcttaagttctcatcaaaagagataagaatacataagtaaaatacaatcaaatgatggtaactgccacaaagataaaaaggcaggaaaggagaatagggaatgctgatgggtaaaagcacagcagaggggtggtagttttcagtatagcagacacacaaagcttcatcgagaaagtgacatttaagtaagggaagggctgtatttgtcttgatcactgatgattcccagccagatggtaggtgttcaataaatatttgttaaatgaatacgtaaacagaattaaggggcccagcgtggtggctcacgcctgtaatcccagcactttgggaggctgaggtgggcagatcacgaggtcaggagatcgagaccacggtgaaaccctgtctctactaaaaatacaaaaaattagccgggcgtggtggcaggcacctgtagtcccagctactcgggaggctgaggcaggagaatggcgtgaacccgggaggcggagcttgcagtgagcccagatcgcgccactgcactccagcctgggtgaccgagtgagactccgtctcaaaaaaagaaaaaaaaagaattaaggtagaattctcaaacattcaccttaagtgattttttttcccatactttggtactgttaataccaccagtttcatcatcatcgccaacaataagggcaaaaaaattaagtgttcatactactatttttgctgatgtggcaaaaaacaaaaaaactgttattctatgaagtcgttattcttcatcaaaagcaatccagaattatttcaggtaattcctaggcagcttttggtaagtgtgttatccatatatatggctaataaattccacggattgaattttttttttttttttggcagatggtctatttagaaggaggtcagcagatagaaatagacagaaaaaactattttaaaaattcctggatgaagtagatagcaacagcattctgcttcctggcctgtgggagtgagtatgtcacataaacctgaactgtcaaatatgtactatcccctctcaatttgtaggtaaggggatggcttcattaaccgagtaaggacaatcagtgccctgccgctatttttgatagatagatggggagggggaaggtattgcttctcttttctgaggaaggaagagaggcacagaacaaataggacaatgctagaatccgtcttacccaatgcatgaagagaatgaggccagacccaaagcaaggcagtgacacacagggcttagagcaggagaagaaatggagaaacaaaaagtagaaaggagaaaaaagggaaaaagaaccttcatgatcttgcttgagctcctagatccaaccatacctgcaactatccccacagatccatttcctctattagctgtgaaagttgaaattggtctctgagctttgtcactaaagctggcctatgaacatatttacaaaataaaggattatctattatatgtgaagaggctaaggtgtctcggttttccttggcaaatgcaaatattaaacaacctacaattataatttgctttaacacaaaaacaattagtctttgattttcctgtaatatactaatgaagacctgaagtaatgtttttccacggtagaaatgtaataattctatgaaactctgatgaatagtgactttgttacatgactagcatcagattaatatttccacattcccatgaactcattgtcataatataataatccaaagatgggttatagttttcagcacactttctcactatgagatggctaaactgcttaaattccatttttgctgcgtcttagttaatttccatggataatactgcaatatattctgcataaacccaaaatattctcaaacgtttataagcaagggaaacacaataggtaacatagattattttatttattatcaaggatattcacaagatcacattttattttgtctcatactgatacaaacatgcttctccataacaaccaggtttttaggaccatttcatttttgcatgtgtgctttaagaaaactggattggacatgataatgccctatatgaaaaagcaatgagaagatgttcatttgtgtgactcatcaaaactgccagactgaaaaatctcaggattcctccagttattagatatctgtcatacatgttcagtcctgggattccagaaaataaaaggattagaacaaggtatatatttttcaattgatgagggataagaaatatttccttccctctctcatacatctacttttatccacatgtctggtatcgagaaaagggtgccagggctagaatttagatttgtcaaaaagaaagagctcccagaatccctcatagtgaacaccagatccttatgcaaaactccaaagtcccatgaagactggttgacaaaagcaattttaattaccttccagtgaaataaaagagagaaagaatgctgggtaataggcataaatgcggaaaattgggtttcctaccagacatatgcagaagcagcaagcaactcagttcagcacatgccacatgctgatgatctggacattgacaagatgatgctgaaataaactagatgactgaaataaagttaaaaagaaatatcaccacttagtgatggaactccatgcatggtcccaaggagctataagagaatattgcctctctttttttttctgctgtttcatacttgaagaatttaagtcaaattttaaaaaaaagctaattgatgagaagagagaaaaaaatcctaaataacaaataactttcttttcaagatgataatttatctgtttgacttctgaaagatagatccccataggaagcaaaagatgattcagtggttcactcaccattcatgatcacttccatcatcaataaaaacaaacacaaacaaacaaaaaaaaaaagaagaaataagtgggtgaggaagggaggaagaaaggaaaggaggaaggggaaaggaaaggatagaacaagacaggataggacaagagagaaaaggaaaggaaaggaaaaaggaaaagtacaaggaaaaagaaatcagcctgactcataatgttgtactgatttctgaatttcacatcaaaatatgacaaatgagactcttttttaatttttattttatttatttgtttatttttttgagatggagtttcgctcttgttgcccaggctggagtgcaatggtgtgatctcggctcactgcaacctccgcctcccgggttcagtgattttcctgcctcagcctctggagtcgctgggattacaggcatgcgccaccatgcccagctaatttttgtattattagtagagatgaggttttaccatgttggccaggctggtcttgaacttctgacctcaggtgatctacctgccttggtctcccgaagtgctgggattacaggcatgagccaccatttgtaggtgcctggccaacaaatgagactcctttaaaacaactagaaaggtttcaatcatacatttgccaccatatatatatatatggtgtctcatatatatatatggtggcaaatgtatgctatatatatattatatatatggcatctatctatgaagtgactttgatgaacttaataaaaaataaatctcaatacaaaaataaatgcaacaagactagaagagttatttcagaaatgattgccacggctgcactgtggatttaaataaagcttgcagagttgcattcctatggcttggtaattaaaataattcattttttctaaatgttataaaaacatacagataatcagcagcttaaattgaaattggtgcaaacactgagactttgcacatcttctctggattcaggcaaatcacagcaagtcttctccatttgcacaactaactgaaatttgttatgtaaaattgccttctccacttctctgaggaggaccagggtcaagctctgtttattcaggggaaaaagcagaaagcagctccactaccataaataaacctgttgtcttttgccataatatctgtagggagttgctgctcccattcataggacaggcgccccaaatgaggtacagtctggccatgaaatgtagaaggaattagtaaagacagtctcttctgattttctgatttttaggaatctacacttaaagagtaggaatggtcacgtgcataatgcatacaagacactagaagagaaaggaaaagcaggtataaagtatgctgtccttatccatgcacatcgacaatgacaacaaagtacttggtccataaatactggtcaaactgtatttctgtttcagaaaaatgtaaaactctcaatctaattccacacctattcaaagtgaattccatagttcagcctggatttttttttttttttttttttttttgagatggagtctcgctctgtcgcccaggctggagtgcactggtgctatctctcagctcactgcaagctccgcctcccaggttcacgccattctcctgcctcagcctccccagtagctgggactacaggtgcccgccaccatgctcagctaattttttgtatttttagtagagacagggtttcaccatgttagccaggatggtctcgatctcctgaccttgtgatccaatggcctcggcttcccaaagtgctgggattacaggcgtgagccaccacgcccggccagctcagcctggaattctaatgcttcaactttagtgttaatttgtatcagaattaaatttaagtatgtgtctttcttgctaaattgtattaaaaattgtactctaaaccaagatctgcctccatgacatattgcaaatactagaggtgcaataaactgttgaatttaatgtaatgaattcagtgcaacaatttgaaggaaaggttcatttaagtaaatcacccaatgtagaagtagaaatgagtctcacttttcataaaaaaatttaccagagggggtggggtgctgtagaaagcaagtataccaactttctgctcataaagtcttgatatgaattactagagtcagagttagtttgcaaattctctactactacattctctgtctctggagtccaaaacgtgcacaatactggacagcagcttctacagaccagtagcgttcttccagttccttaaaacagatcacactagaggttaggacaggattgacttctgcagggcaaaggatcactgatgaagctagtcactgagttttctcaagacagaaagcagagatgctggagcatcccatagcacaagccacaaccaggccaaaacctctacatggaaaaacggttctcaccaaatcaattgagcaagtgagaatcctctaaaccacagaaacaatagttacaggaatccctcaaatttaataacatattctaaataaatcttttcatcaatatcaatcttcttaatctttttagagccatgttttcatcacagtgagccaataaaacaaaagcatttgtaccttctaatttacagagatggtcttttttaaaaagatgtccaaatgatcttcaagaatcctttcgggtcattctagtgcaccctatatttttgtcagttaccttagttttaaaatcatccttcactgtaataacaaaaaaaagaatgagaattccttatctagccaaaaatatttgccgacctagaagtcttgcttgaattgctcctagtataaccagagggcaagggataattaatcttttcagtctctgaaatcctatggatagcattttcatgtgtattcagtaacctaaactcacaaaggccaacatcagaacacattcattcctgaccaccattgacaaaatagcatagatattttattgaaagtttagggcttgagaacaataaaatgggattatcaaaaactgtactatttccaataacccaaagttattttatcaaggggatgtacacattacgcattttatatgtgtatattgtaccccataaatatgtacaacttttatctataataactaaaaattaaaatttaaaaaagaggttgtataggcttagagtggaacctgatagcctaaatgtatgactaagtctgctactgatcgctgctatgacaccgttttcaaaagacctaacttctacacctcttggtttctttatcagtaaaatagaagtaagaatagtagcaacctctagtatttgatagctaacactaaggtacttgaaagagtgtctggctcataggcacccagttaaatgctaactattgttactgaatctaattctatttcctcaaggaaacacagatgtgctgacatccttaaaacgtagtaattgactgtcgatttggagataatgagaatccatcctgaaacacatttcaggaaatacaatttagaaaacatttacaaaggcaggtggtatagaccatggggtggcttcatatcacgcctccagaacataatgccataaagaaaaaaacccattggaactgatctttctttgaccacatatttacacgacaggttgatagcaaaaggtgtttataaaataggctgacggcaacaggattatttgttaaaatgttctcactgggaaaaccagtagaagttccaaaataagcctgaggagaagcacctcttcactttctcagaacactgaaaaccctgtaacctaagttgaccctatctattccaatcttatggggtcatgggtttctttaatatccaagcaacttgaccccattctctatcctatttgcttgagggacgtcctgcactgctgctattatttttgagcatcctgggggagggagcctcgattttcttatcatttctaccccaattttctcctcccagctagatcctcattgctctgtacaccatcctgtggtcctcttatagctccttgactcagcccatgtgtggagtatggagaactccttttcctttattctccagagcacatcctctacccagtaggctcctagaaggttgagaatgacacctgaggtagaatccaaaacaaaaccgaatctaaattgcattatttgacacttttaagtttctgggccttcctgtcttcaaggttttctttcttactattcattctcctcctaggtctcaacctgggccacgatccttctaaaaacctttcaagtcccctatttcttcccaaattccagggccccagactttgttgaacagccagggtcaacctaaattccctgttcctgtattatgcaaaacaattcttttcgttctctcttatgttttcacttttaggaattttttttcctttagggcttacgcttaatatctctctctcttgctcttcccccccaccgccacatagagagataaggagatagatagatagatagatagatagatagatagatagatagatagatagatagatagacagacagacagatagatagatatagatctatagataggtatatcgcatacacacatacaacacacatacaacacacatacaagcctgatgcctggcttaggcaatgaggtgtctgagagataaccagccagtctaaacgcatttaaatttaacacatgaaatacctgcatattctgtcatagtaaataagtgggctttttagtcagcaaaatctggctggatcacatcccaggactgtcttataccatctgtgtatctgcggcaaggtaagtaagattaggaggccatactagctgttccctttgtaagaagcccagtggactctaggtcccttgcaacttagcgtcaccttagtgtgtcagcatctgttttgcaaggtaaagagtttgcaaggtaaactcttttgcattcctatacgataccaccagaccgccagatggttacatgttctcaatacctagtaaggcctagagaagggaacaaaagtcttttatttgtgatgtacctcccccaatctccagccgatcagcactgaaagcccaggaaactactagttataaatttctgccttgtgggggctagggatttctctagggtcccgtatgcacaactagactcagggtctagcttatagtaacctttatgtcataacagtaaaaaacacacccctaggtggagattttatatgctactgatacatgtgatgcatgttagaacatgtagatgctaagcaaatgctccaactgcaggtctgcttttgcatacttgacctcatcagtatgagtatgtatgaacagctcccataaaaagaattcctcttaaggcactatctgccatctctccctttgagcagcttgcttcgcctctcagagtatacttttgttttccaataagcttctttgtttactctgactttggactcgctctcaaattcttttgtgtggcaaagtcaagaacctgaaccagcccaccaacaacatattattggacaaggtaagatcttgggaacctttctgaaactcatttgctcatttatgatagagggagccatatttcaaatttgttgtcaggattaaacaagatgaggcacatgaagcaattaacatactacatggattagagttaagtattagtaataataaataatagctaactaaattcaaatcgagtaagaaaaaaataccaaatactagtaaaggaaaaaaagaatagacagaaaaacatgtggttgacaaaaattctctccttgactaaattttaatcaggatcctctgagtccaattaagccccattcttgagcatgtccttcaagagcccagttttttttttttaatactttaagttctagggtacatgtgcacaacatgcaggtttgctacatatatgccatgttggtgtgctgcacccattaactggtcatttacattaggtctatctcctaatgctatccctcccccctcccccctccccgctccccacctccccccaccccacaacaggccccggtgtgtgatgttccccatataaatcatactgctataaagacacatgcacacgtatgtttactgtggcactattcacaatagcaaagacttggaaccaacccaaatgtccatcaatgatagactggattaagaaaatgtggcacatatacaccatggaatactatgcagccatataaaaggatgagttaatgtcctttgtagggacatggatgaagctggaaaccatcattctgagcaaactatcgcaaggacagaaaaccaaacaccacatgttctcacttataggtgggaattgaacaaagagcccagttttagcaagattcctctcaagttgcttttgccagaatccatcaatatcttatcaccctcaatatctgatccaatttctcatcctccaccatctcccagtgaatttgatcacccaggtttatcttcagcaagaatcctgttaggccaatttagccagatccccacctccccccacccacccccaccccccgccttacccctgagatttcctcttagaaattttctgttcactgatcccctctcctccactcttctccttggctttgatttcccattatttcttgttatattcagggttgagcccagtctttctcccctgctgcaaaaccacactgcagttttccctgcaccaattggaatagtcctgaataaagtctgccttaccgttttaacaagtgtctgaataatattttttaacacggagaaagaaaaaaagcaatgggaaatgatgatgccttgtcccctggtagatagaacagagagcttaagtgtcctatcagctgcaattccctgacctgggaatctctgcagccctcagagaaggggagagccagaaggacccagctgatcctgactacaaaaggttgatattgctgaactaattcacagccactgtcttatccccaggaacaaaattccctccaacccacctaccttctttctcacaggccccctgagaaacgtgaacgcctggcattcatcattcacactcagggcttctgaactcctactccagcgctatgagccaggatttattctatcaggtttctgcctttgtccttcagagtgctgaatgttttgataatcccctttaaaggcaggagtgatccacaggctaaagagaagcagcaggcgttttgacgattgtaggtatgaatagactcttgtttcattccaggtcgaagtacagaatcgtgacccaaaggctagtgatccaaaaacgagatttttataatgccttagaatacatgaagaaaggagggacagagaaaaaggagatgcaaagacctcctgataaaagttatcttaagaaggaatagataatagattcagttaccatgaatgtatttcactctttctgtgtctcaaataatatgcatacaaccctaagatctaatttatttcatttcagcaaggggagtatgcctgaagagatgtactggcaaatatttttcaagaattgttaaaattgtcctgaggttgtaaagcttcattatttctaactaaatggcaaatatagtattaactttttctatgaagccagtatagaacacatccatacagctgtcacagaaaatgtaaccttcaccttacaattgtttcttagattccacttggaagtggtctggaacttaaaacctaatcattcatgatttccaacatggtccattagctccaatattcatgtatagattcattgatatcattagtaaaaatctttagaaatgtgaaccacagaaaggtatccaccattttgtatgtgcattttctctgtcacttttcaaagtatgacagaagtagagagaaccacgttgtccaaataaaacccaatctctttgaatgtttaaatattaaattaatttattcaacaaagatttagagagccttccaggtataaggtgatatatacttgaaacgagcttgtagtaaaaaggtttcctctcatagaaaaggagtgttactaaacctaaatgatacaatgcattatgcaaaccaaccactcagctgacccacagttgaaagcacttactgcctcatagccatgcccatcaattacagaactcatttctgctgagccctagatagacctgaaaatctacctcaaaagaacaatgcaaaaacagtattatcagtccatcagaattaaaagaaatgaaaataatttggccttttagagttagctaatacacacataccacagtgcctggcacaaaatagtcactgagaaaatgtttggtcaatgaatgattcactgaattcactgttgaaagactgaattattactattggacaaaatcatgagactaaacatttaggacaatctatctgaacatacaaacagccttgccaaccacaacaaaattataaaaataagacccaaaggaatccctaattgaaagcatcccggttacaaaataagtcctgaagtgaattctgtaaacagatcaataggaagtttcaaataaataggtcttgtaggagtaatcaatgctgtctgggtgaaagattcagcaggcttctaaacaacagagggcatttatctttgaacagattccttggccatttgagggcaggaaggtgaacaaggctgagacctattgtcaggctagctgaaattctacctccccatgcattttgttcactctgctcacacaagataatttgcttgctctctctacattttctgaagacttgcaaggcaaaaatcctgggctcttgccaagctgtattacattcactgtgactgatacgcatagccgcaacaaggagtagcactgttattcgaagggggcacttaaccatatcattgggtggaattgttagaccagaatggttatgtcacattcgattacaatgtacacaacatgttaagtctaaagcaggaattatttatagaacccaactttcattgttagagaagcttcctgagactgcttgaattcttactgttccctccttctctaaattgctaaatgtatcttttaatattttgctgactaatctcagttgcctcttcacatttactctctgtccttctccatcatgctgcatgaggccgtctgtccaaactgctttacctgggttcctgagctctctggctttcagctggtttgggggttgatggagacagacattagaatgtatgttctctgggatctgacccacagagggagagagaatggctgtgctcctttagataaggctgtaactcctatcaggaggtatttccctgcagtgatagccacagctctctccagattctggaaaaggcttcttcccctctcagtttcatgggttagtaatggctcctgatatttgctactccttgggtgctacaccattctattttgcttctcttttttacccacaaattggtaaattgttctctcacttaacctctcttcaatcaccctatttcatgccaggattctaatttatataaatacatatcacaacatttagcattctttttactatttttactacctttccatatttcccatctgattcctgtataaatttctaatttctaacttgattgtatttctctgaaacaaggagtgtgccacatcctctgggctcataagatttcaatagagggtaggaattgatgtggttctcgaactcttattgctgggaaggaggcatatttgagaagagttctgacaacaaacaacgacaactaaaaattgttgagagctcactatctgccagacaactgtgacagacattttccctataagtctgtgttttatataactaccttgtaagttatatcttattattgtcatttcttaagataaggaatctgaggcacaaatgtaacttaaacaaggtcacagagctagtcagtagaaaagccacgatgcagacttgggtctgtctgattcctgagttcatgccctttcccactatttgagatcatcactcataatggacaccatgactattgctccagtgagccaactgctgcaaatagagctgattcttcattagacacagagtcaccagcagccaatagagacaggatttgattaattctggaattaaattcaaacaaataaatagatagaaataagtatttctgtggttcatgtttttcacctatttactcataaaatgcttttctacgttgaaatagtcagtggtgatttggacatgttgcacttagtactccatatctgtgagttgtattaggcatttctataccagtagaagtgatttttttggcacaatgtctagtatgctgtaagcacttaataagtattataatcaattaagttgttatagaagccttcttgtcaccggaaatcaatgcctgtgttcagcactgagagaagaacattgtatccttcacaaacaaatacgatttttgattatttgatgctgaaaaattaaatatggcaaattttcagatgagtataattgcactgtattaatcacacaggcctgatttcattatagtaaatgctaatttaatgtcagatgcattttttctaattggcacgagaaatgcttttacttcacatgccacatgaaaatatttcagatcatagaatttcagaagaaaatacaagcttattgacttagaggcatttcaggacaagtaaaatacattcaaattatggtctacatagaaaaaggagacttcagaaaaatcaatttaagttcttaattgtttttgaaccatggatccctttcacagttttgtgaagcctatggccttcttctcaaaacaatgctttccaatgaataaaagaaaatacacaggtccataaagaaaattaatcatattgaaaaaagctataaaaatattacaaaagtaaaattgtgacatagtgatacacttcactatgaacgtattaactatcaatatgtagaaatgggtcaaatactgtaatttttaactatatctgtaacaactgcaatgtgatattatgattatgattctatctatgattttactggaggcaaagttgcacataatctctgtgctttgttgcttacacacccataatttaaggaccttaaattcactggaagttagtaaaataaagattacatttttattcctatgtaagttcactgaacccttaaattctattggtgggtcctgggttaagaagcagaagcaggattgtaagcggagtactaaatgaggaaatacattaattagaaagacaggaggaaggaaaagactccctttctccaagactaagtggaaagaaaactggggctgttcgagtggaattaattttagagccaaatatactcttgctccacagaacaaaataaaatgctattttaaaaaaataagttaaaatagatttcaagcagactgcctcatgaaagtctttgaaaacagaatgtgctgaattttgaagtgattgacaggatgaagtgttttttaaaatttctaatgtatatttcatcataaaaaagtgagtgaaagttcaaaaaaagaaaatggtaggactatacatttattttatatacatgataaaatcaaacatgttttgtcaacgggagacttgagtctggattatttatgttagcacactctcaaatttgtagtgataacaggccatgtgcaagccagtccatctgctagtggccagacaatcttagacaggcaccactcaattgcctggattaggagaaaaaaaaaaaggattaaagatcagcaaaaatacactgactaagaacaatatcagcagatttaaaaataggtccattaaaaccaaatactgggctgggtgcagaggttcacaactgtaatcccagcactttgggaggccgaggcgatggatcacctgaggtaaagagttcaagaacagcctgaccaacatggtgaaaccacatctctactgaaaatacaaaaattagccaagtgtggtggcgggtccctgtaatcagagctacttgggaggctgaggcaggagaattgcttgaacccgagagatggaggttgcagtgagctgagatggcaccactgcactccagcctgggcaacaagagtgaaactccatctcaaaaataaataaataaataaataaataaaaccaaacactgagttaccattgtcattaaatgtataacataggaccaaggttggttttatggtgttaccctagaatggatcaggaatttagagggcatatagtaagtattactcaacaggactaaatggtcaccatagtaacaatctagttactctgtatcttaagtctctcctcctaatttccctcttcaatggccacactgaatttccgggttcttggtttttcctaccactctcctttgttctctggcaatgactgccctcctgcctacctgatttttcaccactgcatattctgacctgaagaacttagttccattttagtacagatgactaatctccctgcagatgcctctattcttcctggaccaccaggtgttctctagtcctgcttctgtttctaacccttctccttttacaagaatatctcttagatattaaatcttggtccagcaaaaacctagaaggccttttctctccatgtcacacaatagacactgaggaatgttctggggttgtggacaaagagccagagccttctcagaacaattcagatatgctgagtgagcacagagagatttctgagaacaggagggtaagaacttccagagaacacaggcccatggaaacttacacttttgtatgtgtgtgttttgggtgtttgtttgtttgttgtttgttttgagatgcagtctctctctgttgcccaggctggagtgcagtggcacagtctcagctcactgtaaccagtggtatggtctctgctgactgtagcctccacctttcagatgcaagtcattctcctgcctcagccacccaagtagctgggattacaggcacacaccaccacgcacagctaatttttgtatttttagaagagacagagtttcaccatgttggccaggctggtctctaactcctaatctcaagcgatccacctgcctcgacctcccaaagtgctgggattacaggcatgagccacagtacccggccttgcccttttgatttgaagatcactgtgtcctctgatcaacactttctgcatacagaatagttttcacatcttctgcctatattaattaagttcatattgttttctgctattggtctgcattctttcacctactaccatcaccctttcaagaagtatgtactttctctgcaaattaatgttcctggtcccttccagctaaacctggcaatacccaagatgacaatgagcaatgctttcaacattattttagcaaatttactactttaaagcttaggtcacccttagggcaatttctatatttaaatgaattattttattttctttttattctggacaacatgaacacaaacgtgaagactcatagacaatacaatgaaatatggtcagacaagcaagctacatgtacttcccacaccttgtgggcctcagtactctcgtttttacaaaaaggacagtggatgttattagaatgaagtgagatgaacataaagaagtgagctgagtactacttagtgtctccttaattgggagttccaagacccttgtgggtccgtggcaatactttcacttacttatgatgaaattcaaagaaaaatgcaatgaatttttcagaagacaaaatttatccaactaaaatattgttttgtatccttagattatcatgtgctgcctacatttttgggtagagctctttctttcataaaatcattatgattatagacagtagcttttccccccttaggtcctttatattgcaaaatgaaaatatgaacatatgccatgtgatcacagtccgctttttaaaaaaattgcacaccctcaaggaacttagagaggtctgaaaagcttagatccttgtcataaggcaaaaaagtttctaagcatagttgaactcttagttgtcttggaagctcagaggtatcatattgaaaccaagcaaaccccatgaactggaaatgttttggcagtgctactcacccctatccctcagcatcctctccctgtcagaggccgcggacctgtgagtcactcctctcaaatcagaggccaatctgaccagcatggctgcccccttcaggcaagcctgactgttggctgaagagttccctggactcctgcattcaggcttcttgtccaaactttaactcaatagatcgacttcatcattttgttctgttttcctgaatataaagtcatgtcttgcatattgtaaagatgtagaaaacacaggaaagtatcaagaaggaaaatggaactcatcaataacccaccattaaagacaaccaatttttccctttgagtattattttcttgtttcgataattcatatattatttttatttttatataatttgaataataatctattgatatggtttcgctgtgtcctcacccaaatctcatcttatagttcccataatccccacatgtcatggaagggacccggtgggaggtaattgaatcatggaggcagttacctccacgttagtctcatgatcgtaagttttcatgagatctgatggttttataaggggctttttttccccactttcactctgcacttcgccttcttgccgtcatgcaaagaaggatgtgtttgctttcccttccaccatgattgtaagtttcctgaggcttccccagccctgcaaaagtgtgagtcaattaaacctctttcctttataaattacccagtctcaggtatgtcttattagcggcgtgagaatggactaatacatctatgtatagttgactgtcttgctttttaaggagatatggcatggggagacttttgtcatgctattaagcattctccgaaataactgcatttattgaccaaaaatgtttcatcatatattttttattatttaaaaatagcctaatggaaatgtttgtttataaatctttgtaagaaaatataattatcatggtaagcaaatcagcagaattattgagttgaaaggtatgaaattttaaggcattccatgtagtcaatgtatattagttttcctaatttatattcttaccatcaatataagaatgtctgtatctcccatattggtacctattcttaaccacagttaatctgaaaattgaaaagccagcagctagttatttttatattttcatcattaaaaactactgaggttgaacatatttgatctttattagtcatagttcttccttggtcattgttatacaggttgaattaagttttttcaacataatgttgttattctgtttatttctaagggaaaaagaagagaacaaaatgatattaactgagaatttactgtatggcatgtataaagctttattccaatcttgtagtagctctcataattattctggtggatagccatctaggtttcccagcaaatggcaatgctagaatccaaaccaggtgtgtctgtcttgaaaaccttgagcttcacaatctggtacgcttccaggaatgctaacaatgtatgcaacttaacaatgaccctatagttttaacctcttacttcttatgtggatttgtcaagggcaaaactaaaccagaagttgcaaaaataaagataaaactcttattaattgatagttttccattcttcctttcccaagaatacctgcttctttgtttgggaagacatttgtaatgttaaattgttaagctgtaattgttgttggagtatagttcatttttaaatccttacagtgaattataatattttttaaagtctccaagttcttaatttcctggctttattctaaaagaaattctcttatttcactctagagaaattttgctgttctgtcttgactaatatttttcttatggatatggctgtcatttgttttccgctaaagacattattcaaagagaaattaactctttatattgaaataatgcaaatgaataaacgtgctatcataatagggtgaatgtagagaagccagcttttcttcctaatgttaatatgttggattatatgtagggtttaaaagctaaatgtgaaggcagtgaaagaaaaatagtaccctaggataaaatagtaaatattattttcaatcaataaacttatgatgagtatttgaaaccttaatctcaaacacattcaagaaaatatagtactataactaggtcactgtccttgaatttttcaagggcttttgacctgatctaatgattctagtgaatagactaaattgccttatcagaactatacagtaattgttaagttgcacacgttgatacgcacacagtattaagcagagttaaaaagcagtagtatatctgggtttgtggaaattacccagtaataaaaactcacaatgtaaataaaggtcatttatgtattaataagtttctaaatatgttttgggtgaattgcaagtagtccattgttaatgacagtttcccaaaacaacaactttaaaatctttgaggcatcttagccttgacccaaacttagctcaatatttttctgctgcttcatataaaacaaatgctaccagtactcacagaaatctgaggacctgccactctcatttactatagacccgtatcccatgaacatattaagacgggaaaagatactacgcatggaaaagattatttccacacaaactgggaaggatcaaggctggttccaatcaaaggaaatttgaatctactaacgcttattaagcagaaattgtatctactacatttatagttgtgtcttcatatgaaagtgagtgcaattaagtatattatgtatgtgagatgttacctcctctttctggaattactgcacagtttaatagacatcaaagagtaagattcataagaaggaaagcactatgctatgacatttaacactggcttattcaatgctcaactgactcataaagtgactattactgtctcaccactgtgagtgaaaaaatgaggctcagagtgattaatttgctcaaggtcacacagcattcaaatctggtaggcaagggcttgaacaaccactaaagaagacagaaagaagcagaagacagcgaaaaaagcattttacaaaacatgaagagtttttcaaattttgtgttttgagacttagttgatctttaatgtctccaaggcaaagttcaaagttaagaaaaatatgcatttcaaggaaaagaaaaggagaagaatttctggagttgggacacggaaacataagtagatgggcagaggaaaagcttgcagaagaagaaacggaagcatgtaggagaccagacagaatcaaaatagaaactgagagactgtaccaaaagtagcctaaagcagtctttcaagtggctgcgtccctgacccctgtagggaaagggcagagggagtttgaactagtgtggacttcaggaagcttgggcttcatttaaatgcatggagagctcatcagcaaaaatgaaatggaagtctcatccatgagtgacttttcctaaggagggtctcaagaacttcttttccagaataaccagacattgccatgtgagcttctgaggtactatagttttgctaatgtagtaaaaacaaatattaaagagctcaacagaatgttttaatacctgattatttttttccctgaaattcacttaaattccatgtagttatttagaatctggaaataaaattaaaatgtaccctgaatagaccttatattctatgctctctaggcccaagaaataacattctaagaccaaaagatagatgtcaaagaaaggcaaataagctttataaaagacatttaaatggacaaattaaaagtttgtttctgagttgttgttttttttttttttttataagagacaaggtctgcctctgtcactcaggcaatcacagctcactgcagccttatactcctggcctcaagagatccccctgtgtaagcctcccaagtagctagaactgtaggcaagcaccagcatgcctagctaattatttaaaaaaatttttttagaaacgagcgcttactagttgcccaagccagtctcaaacccttggcttcaagtgatccttttgccttggcctcccaaagtgttgtgattacagacatgagccacagtgtctggcctaaaacatttttaaagttggggagagttagattagactgataaaggtatattaatataagattttatattttaaaaatcttagatacacgtcatgtgtgatgaaccattgctcctgtgttctgtttgatctaaaagcaaagaacttactttctttgtgactactactttggcagacacataatcccaattaactttgaacatatttccattttagcaaatgtcatccacagtgctactgactatccacattctgtatcttttttcggctataggcttattgaaaaatagggtggaggtctttccatagtgtttgtctttacatttgtgactaacaaattcctggcctatagcaatcactcaatagcttattgatgaaacaaccttcaaatcgactgatgaatgaatgaagtgaatggagaatggatagggtgaccaaatgaatggcccaatagagacttctttttggaataagctacacacacattaaatatttctgttgttagaaatattcgggagtaggtcacatcatcacttgctgggaatatagtagcaggaactcaaacgtaaggtaatcaaatagattaaaattgctttgtaggcttcctccaaactgagagcccttcatcctatttactgttaatagcataaacgaatgtaacctatccgagtgagttgtaggaagatatattttaggatgataataagcccaacaacaataacatacatttgtttcaaagtataagtacttcctatttgctggcggcataatggccagttcttggtgacaggctactatgcaacataacacttcatttcaaaggaagaacatggggaatagcgcatggagaaaggttgtactcagagggccactcagttctgagtgctacaatgcccaccaacctcaggaggagcacttccagacaagaaagtacaatggagccgttgtcgttagaagaaatgccctcctcgtctagccccacagttagaggcctggtctcggcacagtagtttcccaagatggccagatggatggagctcattatctttacaaaattccaaacgggataaatgggacttatttcttattaattccccaatggagctaccattgagggctctaaattttgttatttacaatcatcaagtaagcagaaagaaaaagagaaaaaaagaggaaagaaagaaaggagggatggagagaatccattaagcaggtgatctatgataaaggcttagacaatgtgtcttcaggacatgttgctagggccaaccagaagaaaaggaatgccaacatcatcacttgctactgtccccctctctcactaccttctagtcattctgtccctcttacagattctgaaagacgatgatgtcaccaccacagtcactgccttccctcttcctgaaactctctaccaccaggtcttcagtggctcgtggctccagctcactactcaggagtccatctcagtgataccctgccaacaaaagtacagtagcctcccccccactactgttattttcaaacttgattatttaattgggtccttcatggcacttgtcacgatttgtgtgtttaatccatttacttccttatgttccactttgaccattagaatataagctccatgagggcaagcaaagttttgtgttgttcactatggcatctctagtactttctgcaattcctaggatgtaactggggtccaataaatacagaaagcaagaggaagaaaaggaaacagaggctgaggaagaaatacttgtagcatttatcttattttataaaagtcttccataatttcattcaatgttcatttatcaagcaattattattgactgcaggaagccactacattctgtagaactgaacattgttctattcgtgaaaaaagtcttatgaaaaatacagatgccatatttagtaaatgagtagtattttgcttcattgttattgcaaaatcctaaaaaatgcagccacatcttcatttcttgacccttgatctacaactctttctttgtcttgtagcctaagaactgcaggaaatagaaatgaatcactttcccaccaacttctatttcttgttttcttgccacgggttctattcacccacttaagcatcttaagtcaatcaaatttttataaccaaatctccttaacaaatgcaaaactcacttcccaccaaacaaccctaatttagcacaaactttaaatttcaaaggaaatttgaacgtgttttgctttaaatgtcaggactagattttcagacggaataattaagagggaggagacacttccttccaataaaatagattgctagtttgtggaaagtactaagaatattatgtttttttccatatgctactaatgggcatcctgatgatcacatgaagcttgcttctttgtcctgattgccacgaagatgagaatattcgcactgaaatccaaaggatagacatccgctcttaaaaggcagatctatcggcttgtgtcttctattacgcctgcagttttcaagtatcattactcattctcacaacaatccataatccccttgtcatgtggataaggcttgtggattattttttcttactattatataatatgtcatatttcttacataagtaagcagttttttagaacatgaaattctgtattgtttggaatgaatgagattcatgcagtttttgaaatgttttggaaattttactgaaacttattatgattttccaggtttaatgtttagaatctgatcatcatgactgaaaagttatgttataaactgatttatacagcataattttccaattcattgagggtgaaattaagctccaaaagtgccaaaagctttcaagatgccagaaaacaaataaaaagcagatctttggaaatgtttttgcccaacacaagcatttttcacactacatcctatcttctctcccaggctgttttctgaaggtcctcccatttctctaattatgtcagagaaggcttctcagttactaaaatgtactgcccctcttcaacacttaaccctaatgtatttttacagagggagtaagcggatgggtttctgccagcaccagggagctataaacagttcccacagggggtgagagacagggtctacataaagcttccatcaaaactgtaaatcccaaatctgtgaatgcagaggttttccacattgaaaagtgtgattgtgatctttgtgtcttaccaagagatgtgacatttaataactttaaatatctccaaagactgacttcaagatcagtgatattctcagtgaagtaaatgcacctgatacctgtggcaaccatggagggcacacacacacaaattacatttggctaaattacaaaagctcttctttttatttttcatttttcttcattttaagatgttcgttatattaggaaactaagccatgtataataaatgcttttgctttagagagtgtgagcgttcatttgaagaccactgaaaaaactggatgaaatcaaacagtcaggaatacaggctaaaagccctggtcttaattaaagatctactaagcagcaagctattgacatcattgccagcttcaggacaaagataaagtacaaatttttttaaaaagagaaaactgactttgtgtaaaatatagactctagacacaaaatacatagaaaatgctgtccttaagagtagatgataatggcctggtgtcttagtcagtttggggttctataacaaaagtaccacagatgaggtggcttaatcaacagagatgtatttgtcatagttctgcaggctggaagtctgagaccagggttccagcacggtcaggttctggtgaggactctctccctggtttgcagttggccatattctggttgtatcctcacttggaggggcgcagaaagagttagctctctggtatcttcttacaaggacactaatctcattcatgagagttccacccccaagacctaatcacctcctaaaggccttacttcaaaccaccatcacatttgggattcgatttcaatgtatgaattttgggggaacacaaatatttagtccacatcacctggggacaggatgctccaaagagattttgaatgatgaatttcacccttcccccatttaccttcctaaattgtttcagacacagaaacttacgaaagaaaatgaatattttctctttagtcattgtcatgcttaaggaaattatgctgaactcatttgcatgaagatgattcagccttctgaatgatttccttaactaacacagttattattatagatgaggttatataactgaaaagcttaaaagaggttgtaaccatcctttatatattctaactcataaagaaaatattgctgatgattgaaaccagttgattttgcagaatatttgctgatcataaaaagtctttgaaattactttttgaatttccaatgtaaagttgggccaatgaggaaaaagaaacttctggtaaaactttctacctagtgttttatcattagttgttcaactatgatagttcatatttatgtaacacttactatgtgccaggtattgttctgattcttcttcattatttcattttattgtcacaacaactttatgacttatgtattattaggtatgattattatcaccgctttacagagaagaaaattaaggcagagagaagttaagtgacttaccccaaggtctcacagagctgggattcaatctttgctcttaaactcactaaactaaactgattctgaataaggataaatacaacaagtttaacactctgactcatacacagaataacttaaagaagagtaagggaaaactggtgcaggccacaagaattactcatggaggtcctctgtggaacattatgcaaagtgtgttggataatgtttatcttttaacaaccaaagtagaactggtgactaaattctccctgtgcttagactcatacgattcagatgcaataaaaaatgagtcaaaacttcaggtttgtatttccataataatgttgcacccaaagccttgtgaacacaagaagataaaaggaaactagaaagaaacaagactttcaaaaagactaggacacataagggtgattaggagccactctcctcaaccgttttcctttgccctcaggtgcaatcatgccagaagcagttaattctataccctcccctttgttaatttcatattttgtatgctctgtgtcattacattcaccatgctattataactgtccacaccttctgaagggcttctgctcctgctcagagctggcctacagctactgtcttcatgactcacataactgctcaaggctttgcttcctcatctccaatctgaaacttctatctcactgagcttttttggtctttggcttcacatccagtttagctctttttatgcagtcacatggatcacctgtcaagttttacttttactactacaagttaagcatatcgaatctgaaaacctgaaacttgaaatgctccaaaattcaaaactttttgagcatcaacatgacacaatgacaagttagcctgaacacactactttttcactatattaatggcatgtcatatttttattgctaagtatttatacgtgaatgagtgtaagaaaatgattgcttataggtacaatataaatttagagtcaggagtgacagtgatgccaaacaaccacaggttatccacacaggtggctgagatagtgacacttttgcttttccatgggtcaatgcatgcaaactttgttttatatacaaaaattatttaaaatattgtataaaattatccttgggctatgtatataatgtgtatataaatcataaataaatctcatgtttagatttgggtcccatccccaagatatctcattaattatgtatatgcaagcatctcaaaatctgaaaaaaaaacatctaaattctgaaacacttctgatctcaaacattttggataagggatattaaacctgtactattaatagctacctgaaggcattgcattaggtactcaacactcatttaccacaaatgtagatcaaccatgcaaggcaggagctatcatccctatgatcctaatacacaagggaggccagaggtttctcttggggagtgacatttgagctgatagcttaagtacgaaaagggtttcaatttgtgaatactagaaacaactaccctaggcagatggttcagaacatgtaaaggttttcgagtaggaaaaaacctagaactaacaataagctaatgtggctagagaaaaacctgtgagggacagagtagcagagtggcccaagaagggaccacacaggccaggcaagaccgaataatgctggcttcatgatgtatttcctccactcaactatgtactcagtaatgccatagaccgtgtttccacgtttgattcatgtgggctcccagagtcttgtatatttgctcacccttagtgttagtttgaatattggttttggaattgctggtggcattgatgatgaatttgttgttggtatccacaatggaattggtggtggtattggcgatggaattctgatgggattgctggtcacattgatagaggcattgtggtagtactactattcactagagtagaaacacagtgaatgtctactgatgatcaccccctaaatgaagacctgtcttaatgcaccgtatgttataattcacatcattcagacgcaaatgatagttaacactgaagcctagatgagaaggtgaaaagcaattaaaatgtttcacctggttttattaacatgcttgaccagaggcagacttaagaatttggaaaagctgaatttaaataatttatataccttaatgaccacatccccagcataattctttctgtacttctggaatatgctctaactcttgtgtaaatacagtctgactctccttgaatcccttaagtgtgatgtcatctgggaatgttcttcatagaaataacagatttgaagagcctaaagaccaattttatattttattagtaatttggtattcatccagatggggaaagggaccagaaaatatcccctttcatgagaatgttataaatcacaaattcccttaaaaatgtacaggcagcttcataccagatactaccacaaggatgaggaagacacagtccctgaactttgtatccatctaatgataccacttactcagcaccacatacttgtattaagcacatcatgtctattatattatttaatctaatggaaatgttattattccaattttatacttgaggaaacaggcctagagaactgtctttcctcttgggaaaagcatgcatttatgtcagccagaccccgatggatttcaatagtgatggtacaatgtccaagaagctgaagaagaaacccaaagccagagaatgaaacatagggtttattaagaagacttacatacagggcagttcagtagtggcagggtagacaagagaactgtgaccacttgtaaaaagcatgcagtttatatagcattttaacttagctttctcttccagcaacctccacctggcaaccttcatttaacccaaaacaaacagcctagatactctgtatggcctgtgttccaagggacgggctggaggttcagatgttcctcatatataaggaatgaatccctgggttgaacactcttgcatttcttagatgttcctcatagataaggaatgaatacctgggttgaccactcttggatttcttagactccccatagggtctaagaatagaattcagggtatgcttaaattaagtgactgctgtcaggtacatctgccatacaacttgccattcatgaatctcacctccccccttgctccttggatcaacaacctgggaaatatttaagtattgcttagtacatcaatgaaccttaaaactaaggatccagggtctatgggtgagaattccataggaaagttccatagggttcttcggatccctaagaaacgagtcagcgacaaagaaacacctgaaggatagacaccagtgatgaatctgaagtacatatgggcacaccctctctgagcagggtgacagatttttaccagtgtattgtgtagagtgaggccaggacttggagggaatggaagacctgtctaagtgcacagggtctaacaatgatcagttaacatcaacgagtaaacaattaattcattaatcattttgtgtttttctcataacattttgtccaaaggaatttaaagcaaaaatctgtatcaaataagagaaaaccatttgctgaactctaccaataattcttttatgcctggctcaccggtttctgaaattctacaatcagaaagttgtccctttaaatcaaagcactatccttagaaataaattaggaattcctaggcatggtataatgtagagtaaattaatttgcctctgtctctttttcagaacggttttgattaattgagagttgtggtaagaattataattaataaagaaggggaaagtttggaagggaaaggctgggggtgatttctgtcaacttacagtttaaaaattacaatgtgaaaatctctggatttaccgaggtacatccctaatagaaatacgtacatgcttaccaaagatatgttccagactgttgagagaatgctgttgtcaatagctaaaaaactgaaactgccaaattttccaccaatactagaataaataaaataattgttgtatattcatgcaaagaaccaagggtaaattaactattgctacataaaacaacatggatgaatctgacagatgtcagatgtcatgatcaacaaacaaggtctacatgaaagagttcatattaggtgactcgatttatccaaatacaaaaaaaaaaggtgaatctaggctatgctgctagaagttgggattgcgattaccctcacagggcagggcagttagtgactgttgtagaacaatagggaagtttttgtggtgctcattagagtgtgtatgtttggtgtgtgaaaatttctggggctctacattaatgacatggccattttctgtatgtatattatgactttaaaaaaaaaaaagcaaaagcaaaaaagtaaaaaaaaaaaaaaaaaactattgattttgcatcagaagtctacttaaaaaattaggtcccaacaggttatacaatcttaggtgatcacttaacctctataagtcttaattaagttgtctataaaatagatgccaatcaaaaccgattaaaatagattacaaattgtaatatgctttgtaaattataaagttctgtacaactgttaattatttagaccagtggtttacaactcttgctgtgattaagattcacctaagaagattaacaggggcaacaaaatagatatgttattcccactaccctacagattttgatttcctaggtctggaaagaagccagtgcatctctattttcagcagttccacaggcgatatagccacagctttgggccattgatttagaaaatatcttcttatttcaaaagttaataccccatttcggttttgtttctgagatctgaataactcatctacattttgccaatcacaagttacagacacaatgacatttcaggtaacctaatgcatttagataacaaatatctgacgagtaagcaagagccttaatgagcaaaaagatatttcatattaaaccaggcacccagaagcaaaaattgtgtgtgtgtgtctgtgtgtgtatgtgtgtaaaactcacaaataaattataagggcagaacgccttcctagtaatatccaaagcctgagtacatgccattgcatatctatgccagaaatcatgatccaatgtatgctttggttttattttccctccacttacgaaatgaacaccagatgtcgaaacagttttttataacgtttcttctgacatccttttcatgtttttaatagtatgttgttccaacgatgaggcttcttggacttataaaattgctagacctcaagaagtatatcagttcccatcaatgagtaaaatgtataaaatcttaatggtttggagtttttctttgaatccctatgatattcaaattgcatcattcatctccccctaattttctccttagacaaattcattacacacaagaaagagttcagagcaaagcaatccaacatttgcaatttacttgtgtacatgttgccccaacagtagatactgaataatggttgaatttaacagattagtccttttgagactagatcatttcctatagccaaaaataagatactagattttatgtagcccagttgtggagatgcagttaaaaccaactcttcctcaaatacatgaagctgtagttgcatggtatttttattggccaacatatagttttgtagtggattacatctgaactgaattttcagtgctgctgtgtgcatattaaatgtttcccttacttcctgctttaggatcctaattagcattatgcataaccttgaaaataatctagtccagtatcattctacacttttatcatatatatgctatggaataatctgtcacctagatcacatactgaatttttttttaaataaaacaatgaggccaggcagggtggctcaagcatgtaatcttagtcctttgggaggcccaggaagacagatcgctagaggtcagaagctcaagaccagcctgggaaacatggtaaaaccctgtctctactaaaaatacaaaaaaaaattagctgtgtgtggtggcacgtgcctgtagtccaagacacttgggaagctgaggcaggaggatcacttgaaccaggaggtagaggctgaagtgagccgagattgagctactgcgctccagcctgggtgacaaagtgagacccagtctcaaataaataaataaataaataaataaaacaacgaaaagctactttttaatgcaatctctcctcaaatttttcttagaaacttgcttatagttaattaggtatggttcattaattcctacctgttctaaaaactaaggcactacaaaaataataggtacatcatttgtgactctctgaggaaacacagagcttacaaaaaagaaacctagtagtaacatagagataatatgtcattttccattttcaacaaatcatgtcatcaaagacataatgcagagaattatagaatattcaacagcaaacattaaaaatttacattctgattagtgttattttatcacttataaataatttaaataaaagtttggtactgttctgttatttgacattgctaaggtatgaacttgccaacagaagttggtttttttccatcttcaaagaaaatctaaactttaatcttttacacaaggcagggataaaatccttctactacttagtgcagagaaaatgctgagttaaatgtcttgataccttagtactccatctctttcctttctgttgcttctggaagccatctgaagatcgactatcattcctgtagagctgactcagtctttcctcattatccctgtccctttaatccatgttctcttatctcttctctcttcttccccaactttgttccctcattttccaggtgagttggggggctttccatccatagtgggactgctgccttacatttctcaattggaagatgaatcagttggacaattttgtgggacatctttgatatagatgtcttgctaaaccttgatatgccctagagtatttgtttgttttgttttattttcttctttgttttggtaataagataatcttgattgagcaaaggtctagaaagatgagcttacttttggtcaaaatgagacagacaactgatttcaacatttctttttctctaggtatgtgataaggacaaaagataaaactctctcaaatggtacttgaaatatagagttaagggtgctgtgaacaacagagttgcttttaaaaccatttcatcagcacaataccgtggttgaaaacatgagatactaagagttacgctatctacattcaaacgtcagctctaccacttattagctgtgtaaccacagcaacctctctatgtcagtattaggaatgataataaatcctatttagtaggatcaccacaagaattaaataagtccacacatttaaggcacctagaataggacctagcagaacataaatgttcaactattaaattattttaatatattttgggtttcattaggcctgcaaaagtaaggtaagtatctatagtctggatagcgagaaccacaacaggaaagtgattacactatactttgcatgaacaaaaaggagctaattagaaagtggcccatagcatctgtcctcagattgggaatgggaaaagaaccttcccctgtactctcccaattggtggccatctaacaacatccaataagactcagattgatttatttatacctctctttttctatcaaggtgccttaatgttgctaagtgatgctaagttctagggtgattctagggtgcctgaaccatccagacatccctaaagaataaatgaatgttggtggaaagctgtttggtctgtactgatgaggctttgccaactccatcactaacccagggtttcagatattttactgtaagtttgtttgctctaatccatgctaagacctttccatacattgtctcacttcctccttacaacctctctatgcgacagagttcatcattttctccatcttacatatgaaatttcactatttgccaggcacttaaagttcagataaaaattatgcagatacagtcaccactctcttagaatgtacactttcatagagaaaagacattgaaccctattaataaaataatgtgcttaaaattgttatacacacctaaaggagctccacaaggtactatcagccctggttttagagactacagaaggacaaagtatatgtaaaaatatagctggtagcccatgggatatccaagaaaaaggacttgtgtttgcaacgaagctggggtagaaggtatcatggcatattctaggatatgagagaagacctggcttgttggaagtcagacagagaagaggagtaaggacaaaggaaaatgtaagtgtggtctgttgaggctatcatgaaaggcctcaggatcatgttaaatattttgggcatgaggcatatgacaatgcacagccatttaaatattttaatcatgtcagacatggtggctcatacctgcaatcccagcactttgggaggccgaggcaggcagatcatttgaggttaggagtttgagatcaggctggccaacatagtgaaaacctgtctctactaaaaatacaaaaattagctgggtgtggtggctcacacctgtaatcctagctactcaggaggctgaggcaggaaaattgcttgaacccgggagatggagggtgcagcgagccaagattgtgacactgcattccagcctaggcaacagagtaaactctcaaaaaaatacataaataaataataaataaataaataaataaataaataaataaataaatattttaatcatgaaaataacatgcttatatttgtttataccctggctatagtgtatagattggatgttgcccctctctcttgcatttaactcttcagcctctctttggtggtatttttgtgtaaagctttatataagactttaaaatttatgctttacttttactataagagaacagtatgccctttagccacatttcattttttaaaagatatttataatcctcaagaaacgatagtaaaggcattgtctatagaaatagagatttgagaataagaatttttttttcctttttgcctatgttttagtatttcagaagttctaataagacagtaaaagaacagcatgcctttaaaagcaaggttctaatttacataccaacttaattggccatgagatcttcaacttctatttcttccagcacaagtatcagaattttttttcttgcccttgctgtaaaaatcctcgaagagtaaatagatttatgtaacacaatgttcttaaaactttgacctagtcataattcagtgtgattttaattcctttatacctaagtgctaggcaacatgccacaatgtgaaataggaaggggaaaaagatatatttagagtttggagggcaagaaaactttaaaaaacaaaaatagggctaataattgtaaaagggctttagaatgaataatctaaaggacttccaggaatgaaaatgaaacactcttagagagcagagaaagacgatcaactagaagcctccagtgattgtcttccccacaggaactccaaattgagcaactattcatacaaaaaaaagcaacttcataagaaccaaaaatcaggtaggcattcgcagcacctggttttaacatcatattaaggaatgaggcactgaatacaggagggaagacggttttgtatggcctacaccactccatcaccatcccctggcagcaggcacgtggtgtagagggagaatctgtgtgtttgggggagggaaagtgcagtgattatgggactttgcattgaaatgcagtgctgccctgtcagagtggaaagcagaactcagaaagtaggacagggaagaactcagccagtgtggatggagggagcatctagacaagccttagccagaggcaaagtgtccatcccattggtccaaatctgagttcctgcaagccttgccaccatgagctaaagtgccctggggtcctcaatcaacttgaaaggcggtataggccccagttgccaagctgcaattcctgggcaagtcctggtgctgtgctgggcttggagtcagtggtcttgggatgcacatgacctagcaagatgccagctagagcagccaagggaatgattgcatcatcatgcttccccaaccccaggcagcacagctcgcagtgccagcagagactccttccttttgcttgagaggtgaggggagagtaaagagggctttgtcttgcaacctgtatgccagttcagccacagcaggacagggcaccagacagagtcctgaggctcccatttcaagccttagctccccaataacatttctagacacagcctaggccagaagggaacccactgccttgaatggaaagagccagtcctggcaggattcatcacctgctgactaataagcacctgggccctgaataatcagcaatcatacccaggcagtacttgctgagggccttgggtgagacttagagctgtgcaaacttcaggtgtgacccagaataatcccagcttggatggctatgagaagaaagagacttcttctgtttgagggaaggaaagagaagtaaaggggacttcgtcttatagcttgggtaccagctcagccacagtgaggtacagcaacaagtacactcatgtggtccccgagcacagacctaggctcttagacagcatttctggacctgcccagggccagagggaagcccagtgccctgaatggtgctggtctgatagaaccccaccatgagctgatggtagttgtggccacagggagaggcacctctgcatgtggaaaggggagaaaacagtaggaatgaatttgtattgtgatttgtgtcagcttagtcacagtagaatagaacactaagtaaatttcatcatgactaagtgggatttatcccagggatgcaaggatagttcaacacacacaaatcaatcaatgtgatacataatgtcaaaagaatgaagagcaaaatccaaatgattattttgacagattccaaaaaaggcatttgatacaatcaacatcccttcatgataaaaaccctcaaaaaactgggtataaaaggaatataccttaacacataaaagccaaataaagaacaaatccccagatggtatcacgctgaatggagaaaaactgaaagcttttcctgtaacatctggaacaagaaaaggatgcccattttcaccactgttatacaatatagtactagaagtcctaggtagagcaattagacaagagaaaaaagtaaagggcatcaaaataggaaaggaagaagtcaaattatcattgtttgaagataatatgatcttatagttgaaaaaccctaaggactccatcaaaaaaaaatattagaactgataaaaaaattcagcgaagttgcaggatacaaaattaaccagaaaaatcactagcatttccatatgccaacaatgaacaatctgaaaaaggaattaaaaaaagtaatcccatttgcaacagctacaaataaaataaagtacttagatgcaaacttaattaaagaaaggaaggaactctacactgaaaactacaaagcactgatgcaatatattaaagaggacacacaaaaatagaaagatatcccatgttcatggattggaagaatcactattgttaaaatgtctatactacataagcaatctacagattcaatgcaatctctattaaaatatcaatgacattcttcaccaaattaatatggaaccacaaaagccaaagctatcctgaatacaaatgaaaattaaaaaaaaaactggaggaatcacattctgacttcaaattaaactacagagatacagtaaccaaaacagcatggtactagcagacacatagacctataggatattttgtttcaattctttgattgcatttctaatagcaatagtttttcttaaattatagaaaaatctcaacatatatttcaaatgtgaaaacatatcaaaagttttcattgtttctgtaaatctgggttcacaaaattaaccactaagagaatttgcagatggtttactaaaataagtctgacttaaaagtaattagaaaattcggaggcacttcaatttaacagaaaaaacaatcatgtaaatagaaaaccagagtgtcctatctgataagactgatggaagcctattgaaaataatagagcttctccactaatttggttgaccgattcatttcctgaatgagtaatcctcatctttgcctgcctttactttagccaagagaaaggtccttcttgcctggctccctaaaatgagaaagtagtaccaatccagtaagctgccatagcttttgggtggtgtcctataggccatcaaaagactgggaaccagggactttccatatttagtggattaactgcattttactaaatatgtcatttttcaaacttttctacaactatactttgaatatactacatttgtaaaaatttgcatcttaagttttgatttctgattgtatgtctagtccctaggaatagtgtaaacattgttatgctagcaataatctatacctttctacttttttccctgccatatttctatttgatgtgttctccattgcagtaagtacatgcttcagattcagatccacttcaaaatatactgagttttctgtgcataaatgtcactttaatgactacaacagttcatcttacgaatgtaccataaatagctcatttcttcagtgttcaacatgcaggctacttctgctcttctgttataataaatactgtttcaatgaatatcattttctgtaaattttcatttgcattttatgctacttttaaggtagaattccagcagaaagattcaaagatcatgaatactttcagttattgagatacattgccaagtgctttcaccagaagttgtaaaagttttcagctggaaactgcttatgataaaatgttatttaaaaagctgaggataaaatttaacatatagtgtgcacttaacctgtgaagtgcaaagtgagggggtgggagtagtctggctgaaggagaactattttatcactgccattgtttagaattgcccaagcatggtgacaacaaaaagcagacccactattagttggttttactattgctattaaattcccttcaaacagcgcaccctctcgtgcttacacctgaggggccactgcttttaattacataaatttatatacataaaataagagccatatatcaagttgttgacacaagcaatgtgtagtttatttattaaacaatatctattgtgtgctcttcatgtgcccacaccccatgaggtagtagagatggaatgttaaataagacaaagttcatgctctcaagaggtaaagtgggggctggaattatgggtgattttttattctcttctacatactggcagtgcccacattttgcaaaaatgaacaaattacttttatttttagaataataataaatgcattaattactacaagttaaaactgctatgatgaaatctattactacgcattctttaatattgcaaactagattcattactccctccacaaactttgttttcatacaaggggtcatttgaaagtcccaaagagagacaatataaaaatgcaaattgatgaatgtaggttgaaaaatctggggaagttcccatgttcagaataggccctcctattccctccccgatcccattgatctgcccaaagacacaccttcaaaaagtgtcatggaattcctcagatacaaccaacaatagatactttataaatttaatagaatcacaattacaaagaggatttgaggatgttacaaactgtgtctgagtcattgccaagtcatcagctatattactttcaacttttgaaatgtttgaagaacatgtgctttgttagaaacctgggggaagggatgggaaaattctctgagaaatttctgccaagagggaaggaatgaacagaagtgatgcctgtttgggtggtgtcatataagatctgggagttgaggcctcatgaatacagggcatttccttcatcacacagaggacatcatcatccatttatttatattacaaatatttttggtatacttaagttataaacataaagttatcctggatatatagaagtgaattaaatatttgaagttttgtccttatggctcttacaatttaataagtctaataaaatgagaaaacaaagtaaataaatccatattttcaaatttgttataatataaaagaacgtggtggtctgagaaagaaagataaggagcccttatgtaagatgagatgttcacagaaagaccttctgggaaagagacattccagctgaatcccagggcaaaaaggtgctagatattatagagtgaaaggaaaaactttcaggtcaaggaaattgcaagtgagaggctatgacacaggactggtagcatgagaagctctgagagatcatttggctataatgaagtgaacaagcgggagaatggtgtaagaatgaagttggaaaggtgggtaggaattaagttatcaagtagagagatatctggagaccagtagacagaaatatatggttgaggcttggagggatttgggaaagattataatggaagggacttcatagaagcgggactgctgtgacaatcagtacatataggaagccaccgtattttctctcgaaagagagggacccagaaaggtgagttcacatggaagtcataaatgtcactgtttctgggcatcttcataagtcctaggtagcaggaattggagggagagggtatgaaatggaaagcctgcccataatgtctaatgactaagcaacacaacagagcatggttaccaagtaaaccagggtgatcactggtcatttacatcctactttatcacgtagccactggtgcaaactgctaataaaatgaaattcagtgtctctaatctctgattgtgtctacaacatgtacagtatgtttaaatttgatagaagtatagaatgatagtttatttctttattccttctgaagccatcttcctctcaatttgagatatttttttgacatggataatgcaggtcacagaaggaagccttcttttttctttgaatagaccaggaataggaatgataaataacaaataactgaaattcaagtcaatctgaagccaaaaagaaaatctgatgatataatattattaaccatatggaaaacccactttaattgctacactaattctgctaccaataagattagtgcagaaaagactgaatgaagtcacttcaatattaattggtctttcaaagcttaaacagaaatggctattttaaattaatttaggaagactacaggcactgattgtttcaaatagtggcgtgaaaagagaaaaagtaagtgctaagaggcttaagaacattattaaactcatttattattcttttttaatatagagtaaattatagaaatcttacaaaatcaacagaaggaaagataataggctatcatgaaatatgcaatttattttttaaatgggaaaagaactattgaatcataaatggaagaaccattaggaagttatgtaaatgtttccccttcgagtaatataaatcccatatcaccctaatgtgtacaccccaatagttttattcattatcataaatttcagaagtctcattccttcacaatatatttcaaaggcattttattttcatttttaacaattaaacaattttatcgtctcatatcttcaaaatatattctgcagtttgttaaaaagaaatgggacttgcctagcaattaacaacgtagataatggattaacttgattttgctttacttcattgttatctttcacctttaggaattacaatttttaagactggaaacagaaagggccatgggtagtccaaaatttcagaaatcatgaatattctttgttataatcctgccatagggactttgcattaaaaacaaacaggaaaaaaaattcttcagtcccctccctagcttcacctcttaccaagagagcaggctcatgacctaagaatcaaataggttctagagtcagacatacctggattcaaattcttgttcctccatttattaataccataattatatgcttgaataagtaagttattaaccacttctgggcctcagctttctactctagaaaacagacacaaagatatcccacaggaaccacttacagtgtatgtgacaggatctaatataatacttagcagacattagctgttccataaatattcattttgctttccttaaaagtcagttggcatacattttcaaaatctggctgattgaaccagtgtctcaccaaacatcttttcaaattctagaaatctactgtagaagtttagggtcaaaacagtggagtcatcctgaattatcttggatagaagacataaactttctaagtctatttccttgccagtgagatgaacagtaacacagcctatttcgctgggtgagagcagaatttctcagcctcagaattatagacattttggatgaaatcattttttgtggtagggggttgtcttgacaattctatgatatttagcagcatgacaagcctccatccaatagatggcctaagtagctccatcccaagtcacaacaaccataaacatctccagacattgcccaatttattctggggaacaaactaagccttcattgagaactactggattagaataagtaaagtaacttgaaaatcacttaacatagtacttagaacacagtgattttcaatagatgttagtgattaatttttacccaggtataaaattaaggattgcatttctgattatgttatctcttcaatattatgcataagcattggtgacagtaaagaaactgctcaaagaggagccagatttttccataatgaccccaaagccaccaaaaataaaatgattagatacaattcttttgggcaaatattcatttggaccttgggtataaggtgatgctggcatcctgctctgcctgacctccttctagggaccattctgtctttcctagttggtgccatgctgtgtctgtgtctcttaaagcaaggttacatcatgctgctcaggaagcaggctgagcaatgggaatagctcaactctgcattgagttatgccagtttgggcttcatgcagggctgatgcagcttgcacatggctatcacttctttttttttattctattattattatactttaagttttagggtacatgtgcacaacatgcaggtttgttacatatgtatacatgtgccatgttggtgtggcacatatacaccatggaatactatgcagccataaaaaatgatgagttcatgtcctttgtagggacatggatgaaactggaaaccatcattctcagcaaactatcgcaaggacaaaaaaccaaacaccggatgttctcactcataggctatcacttccttcgggctctcctttctttcaaaaagccttctgccaaatctaccatgtgaccagcatgtgtgcacatcttctgtgtacgcttcaaaagtgcaggtgtcacaaataaatgagttcacaatttaggatgctgttagtagattcctgactttctctgaaagttagaagtgtattataaaaacaaaacttacatctatatgtaagttgactgcatcagactcaccccatgggcattagagtgtgacattagtagtgagccatcagtaatgtcccaatagatcccactgacttgccacacgtaacacttgtttgcatagaccacaggactgcaaacttcagcagccactcactcccagtcaaatccaggccctcatctcttttccaaataaagtgttattgaaacacagctacattcatttgtttcattcatctatgagtgtttcaggctacagtggcaatgttaagtggcagaaactatatgacccacaaatcctaaaatatttactacctagttgtggtaatgtgataatgactcccaaagtcattgctatgttctaacttgtgagtgttaccttatttgggaagagtctttgcaggtgtaataaataagttaaggatcctgaggtgagatcattctggtgtatctgggtaagccccaaattacagcaaaagtgtccttgtctaagacaggtagagggagattagacacactcagaggaggaaaagcgaacgtgaagatagaagcagagattggcgtgatgtagccacaagccaaggaatgtcaagacatgttggcagccaccagactctggaagaggcaaggaagtgttctcccccacagcctgccagggaggatcctggcccttcagagcccatgctggcaccttgattttggacttttggcttccagaactgtgagagaataaatttctgtctgttagaagccacaaagttcagggtaatttattacagtggtcccaggacattaatactctggccttttatagaaaaagttttctgcaacaggcaaaacctgtaccaattaatgcatgtatctactgcccaacataaggaagaaaatctttacacacctataaaagctatctgcataccctgccctgataacatctaaatgtgatatttaccaagcctgtgtacatctttttacatacatcaataaggtatgcatccaaagcaaaacagtatcatttagaatatgttacattttacataaaaggtatatttttatgtaagcttctaaaagttgcttttctagctcactataatatttttaagatttatccactttgatacacgaagctttagtttctctcaatgttttagtatatcacaattcctttatttactctcctatggatggacactaaagtatttctcattctcattatgatgaagactactgctatactttgagtgtgtcccccacaattcacgtgctggaaatggggttcttggagtggcaatgttggctggtgggttgttgagaggtgattagggcattaagaggaattaatgtcactcttgagggactgggttaattctcagagcagtaagtgaatgagttctcgctcttgcaggactaactccgttactgaaaagagtgggttgctataaagcaaggccgcccctcacacgttgtctctttcacacacactagcttggtcttccgcttttccaccatgttatgaggcagtacgaaagccttcaccagaagctgccaccatgttcttggactttctagcctccagaactactagccaaaataaacctttttattgctacaaattatccagcctcaggtattctgttacagaaacagaaaacagaggaagacaagtactattatgtactttcttatatacgtctcttatgcacaattgtaaaaataactccaggatttttatttagaaatgaactttatggggaatgtgtctcttcagctttatgatgtcaattgcctttgaaacgaattcaataaattacactgcaatcagtagtgtttctgtgttcctgtttccccaatcctcaccaacccttgacataagcagatttttaaatattttttccatgtgtatgaagtaagcatctgctctttagagtaaagcttgccttagtacacaataataatgttttataaatgttaactccccaacttcatactcacagtggaaataaggaagcaagtttatgatagaaaaaataccaaaaataataacaaaagaatttttaaagacatagtttaaattgtatctggtatacagttgaagaatcggcaaaaacacattggattcactgtgtgggactttacgtcaaccattttaactcttgtgcaaactttttttgttcattaaatgggaggttactctctctgtggccccttcctgctccaaaagtctctgcctgtaataaaaaataataaaaataaatagaattccaagcaaagttcacaattctatcactttaatgcctcttttcttcagaatatatgaacacttgcacaaaagagtcatatatcctttgggtggttttctgctgtatctgcctacctctacaaagcaggaactattccacacttcccctcattccttcagctccagctgtcctggccttctttcattccctattgctccaagaggcaacattcttgccactgtatgactagctaatccctaccctccttcaggtcttggctcaagtgtcacctgtttaaggaatccttccccaagctccccgtcaagatcaaattcccctgtgatggcttcctatgcaacacacttatccttgtaatacaggcaagcccattattaggcaataaatgaggttcaccattcaatcatataaaatgtgggatcatgctagagtgaagtttgtggaaaaccgttacttttcagtttctctttactgtcacagaaggcagaaagataaacacagtgaaaggtatctggaatataacggactgaactaagagttcccaacaataatgagattggagaggaagttagggatcattcagttccttataaggtttaggaaggattttagagcttattctcaatttaatcagaaatcattttatttctacagtgtcttattatatttttcttccgcaatcataaagtagttgaaaaaactactgaactacccttcaactccttaatgaggtttgccctaagaaattaagaactggaaattgagaatggagaatgaacactggatcaagcatcaaagtcaactatgttataactggttctacaactctgagtttgtgtgttatgggatacgttttcttgagttttagtccacatgaactctagtttatgtgtcattagattaatgtccatcttattacctgaaaattaaacttcaggaaggtaggatttggtgtaaatacagagtaaatgttcagtaatcactagttgaaaggaaatgaaaagaaaaaaagaaccatatcaatagtttattactgggagagaaaaagagaataggacactatagaaataatacactttatcattaaatttaggataagcttcaaagtcctttctaaaccctctaagggactgaatgatgcctaccctctctccagtcttatattcccgtgcccctcactcatcatcctccagccaagtaaatgtctctgaattcttcagtcagcccaggcttctccccctgcctggaattttcttctcccacatctttacttaagggtctcctcatctttctcaccttgtcttacacatcacctcctcagagaaactccatctgaaaagcctatttaagcctaacctacccatacctccaaatccagttattactttctgctgcttgtttatttcatagtcttctttctaggcttagacatgtttcttaatttgctttgggtttactcgtgtgttaacttctttatgtatgcaagctgcattaaggcttacctctttgtattctcaactcctatcacaataactggttcagaacacatactgtattagtttgttttcatgctgctgataaaaacatacctgatactgggtaacttataaagaaaaagaggtttaatgaattcacagttccaagtggatggggaggcctcacaatcatggtggaaggcaaaagtcacatcttacatggcgacaggcaaagggagaatgagagccaagcaaaaggggtttccccttatgaagccatcagatagatctcatgagacttattcactaccacaaggatagtatgggggaaactgcccccatgattcaattatctcccaccaggtccctcccacaacatgtgggaattgtgggagctacaattcatgatgagatttgggcagggacacagccaaaccatatcacatacttaataaacattaggtgaataaacaaacgaagatgatgctaccctgaaagcatagttacctgtgcagggggagggcacagagctcataaggagaactcagaggaactacggtgtctctctctgataaaaggctcaaacactgacacatctacccaaaagaaggagatgaggtcaggtaatatccaatcttctcttccagccagcaggacagccagctggagtcatcagcatcaatgcaaatgtgttgtctataaggtctaaattacatcaatttatcatcaaactaaaatttaaaacatttttcaagaaaaacacacaagcaaaacatacgaaagtattttattccaagcagcttacatgatttctcatgaaattctgggtcttttcaaggtcatcagaaaacaaaaccaagcagactggaggcttctacatatccagtctcctgatttcatcatagaattaaatataaggcctcatttaggaggatcttgtgaagccccagagattccctcaaaattcattctgaaattacagactttagttctaaaaacaaccatgattaagcatgacatctacagatgcttgctcttcaataaagctgtaatttgggaaaaatcaaagccataaggcactaaattatataagggaggcttttcattactctctaatctagctcactctgagttaagaggcaaatgaaatttgattattcggccagttacttttcagcttctgtgtttaatttactttttctcagaagattaaaaaagtcacacgaactattattaaatgtagatttgaacttgagtttgcttttttaagatcatttgttaagtgattagtatttttaaggggccgaggccattcatttactatgatttaccctagcttagtcaataagatgccttaattaaagtatagctgaaatctgctattcattttttaaaatagctattccaaataaaagtggaaagcaaccttattttttattgactgtttacagtttctttttttttctagtgcatacaatgagttgacagcctcaactaaccaaagaactaatttaatatttaaaaagatcaattttggcaactttagaaccttcaaatcgaaaagtcctctttacaaaaaaggagttcaaacaatagtctccactaaggtgttgctgtttttaattaagatatgaaagatggaaggtttataaaaagatagccaacccctaacatctactgcaatgttcctatacttgtcaattagacaagatacaagttttctgtgcataatgtggcagctatttacatattctacaaaaatgttttaatggatttacaaagaaaaagaaaactggttagaagattctctcattttaactgtctagtacttcctaacatctatgtccatgcaatgaaaccacctgagctttaaaatgaagacaaaaagagagtgagaattttttacaactccaatcctgagaggcgcttgactttttttttttttttttttttttttggcacttgactttttgagatgggatttctgaaaatattcctaagttctgaaaggcagaaagaattgatattcacacacacacacacacacacacacacacacacacacacacacacacacacagagtctggtattggtgatgtacctgctagacccctgcccagtatcatcagcaatagcagggtcctttagtacttggtgcttggtcccatcttgtaattcaatcattaatgatttcatggatcctaattcaggcacagccctccagtcttcatcagtacagacacggattcttcatcatcattgcctgttcggccaagatataatctctctttttagttcttgctctttcacataaaaattccctttacatctgaagatactaatacatactttcatgtcactaattctacaacatttgcaaagcactaactcaccctcactgatctcctggcttcctaaaaattaggtggtaacatttctttatctcttttacatcaggcaattgccttgtgctataaccataactgcaacattatttctgtgataactcaccgagagcatccctggcttttcaaaactctcattttttaaactgtaatgaacacttatcaaatccctattatgtgctgaatattgttatgggtattggggatacaaagatgattatgatattgtccctgtgttcaaggggtttgatgactatggtattgtccctgtgttcaaggggtttattatatagtcaggaaaatggagaatctgactgatgtttttagcagtgtgtgaaaagtttcatcatttatttactcagcaactatttgagcacctcatatgcattagtctccatattaagtgtcaggtatacaatggtgaagaaatcagttctggtttttgtccacatgttcatggagtttacaatctagtgtaggaaacaaacaataagcactgaagtaagcacaattttaaaagtcaaatcgatgttagagctatgacagaaataatgtggataaagaaatacaatatactggaaggggtagggctcaacagtgaggcgtctatgaaggtttccccaggaaggtgaggtaggagcagatctggaaacacagaatgagctggccatgtgcaaaggtcctgagactgaaagaagggtggcatagcttaaggataggaaagggcaaggccagtgtgactaaagcttaacagagaaagcaaagagtggtgcaagatgaaatggagaggtagaagacagatcatatattacattatatgttttatataatataatatatataacataatataatatacagagagacataatatatattcccttcattgcaataagaagccattgaaattcttttaggttgtggactatatttacatatttttaaaattcccctctgaatatcatgtagagagtaaactgaagaagacaggagtgggggctattgtggtaatctaggtaataatggtgggttagaccatctactcatttagcaaaaacaatcactaacctatggtgcctttgaatgtgccccctccaaaatgcaggtgttgcaacctgcattttaatagtattaagtagtgggcctttaaaaggttgttaggccataagaatgctttcctttgaatgtttcttataaaaaaggggtttggtagccaggcatggtggtacatgcctgcagaccagctacttgggaggctgaggcaagaggatttctcgagtccaggagttgggggctgcagtgagctatgatgctacaactgcactccagcctggtgacagagtgagaccttgatttgtattttgttttttttttctttttcctttttttttttaaaggtatttggctctcttgcccttctgccttctgccatgtgaggacacagtattcctccccaccatgaggggagccatcttggaagcagagagtggccttcacaagcaacctctctgatcttggacttgccagcctccagaactgtgagaaataaatttctgttctttacaaattatgtatttcagatattttgttatagccacacagacaaattaagacaagcaatttcttgtgccaagcattgaactaggatttggcactgaataagcaaaatccttgctatgacaaagccatcagtctagttggagaaacaaaagacaactgaagtaatcgaataagcattacatgttgtgtgataacaaggactattgaaaaaaatatggcagggtaagagattatagcatttgggagtgttgatggggttatgttctgagtgtaacagagaatcacagagtggtctaaatcagcctggggagggaatgaagacttctgagaagagaaaacacttgagcataagtgggatagtccaaataatataaggatggggagataggtggagggatgtaggaaagtggatgtagaggaagatttcaggaaccacacccccaaggcttgaatgaaagtttcagtgtagagagccaaggaagacaagactagagccagcagaggccaccgcatgaaacaaaggcctgtgcaaagctgagaatttggcccttcatccaagagctatggaaagggcttcaagcaggtgaataaattagaactatcaagtttggcattatggaagatggttaggaaggaagtcactagaagacaaggaagtcagtaggcaaacattgagcataagccaaaagatgatggtgcctgttaaagtagtgggaaagagggagatctgagagatatcaagtatgtagaatggacagaacttatcacactgcttggatgtgtgcataggggtgggtggtggaagggagaatagtctagtggaccacgttgtgagatgcaaaatcccttacaacctgctctttctatatgctctgacctcacctatgccagttcttccacaccctgtgacattaccagtgttctgtcagcccctggacatgccaggctccttctcagctcatggtctctgcaccatgtgtctctctgtctaaaatgcttcccccaggcctttgctggtttatcccttctcttcaggcaggtctttctgctcacatgtcacccacctaaaaagcgcttccctgatcatcctaggccgatcttgattacacttcatcacctgctcctctcttgcaaatcatcttacttttaaatcacatacatgttaatttgctcagaagttggtttatccacatttctgtttatatgtttatttacatatatggggagagtcaccgctgagctccccaagagcagtggcatcaccttcaaggtttaccactctgttcccaaccccttgcaaatcctcaataaatattttttgaatgaatggatggatgagcagaggaactgggtaacaaattacatacagggcttaaagcttagtagtgaagctgccaagtatgaaaggttcttttttttggagacacacaaattaaaaacagaaaggtacgcatttgaaaaaaaaatcaaaagaagaaaaagacaaaaatgagagcagttgaatcttataataaaatgtttacttcagaccagggtgctgtagcggcacagagagtcagtattttaggctttgcaagccgtaaggacactgctgtaactactcaactctgctgttataaacataaagctgccacagacaacacataaacaaatggacatgccagtgttacaataaaattttactcacaaaattggctgaaattggccagagagggatggtttgctgactcctgctttatactaatctaataaaggtaaaaaagagtgacacacaattgaagcatataaagaagaggacctaatcttattgagactcttctatgtgctagaccttttgcaagatcctttgtctacaaaactcatccaatctttttaacaactccagtagataagcatcattatgaacattttgagttccaagaggaaaaataacttatctaggtcatacagttaaggagccaggccttaaatccaggaggtctttctcctccaaacctccacaatcatcatatatgtttttatcaattcttcccttatagccacaaaatacctttctatccctttttggagagaggtataaacatctgtgcatatgacataaatatgttgatttcaactccacaaacatttacctattacatagtatgtgccaggcaggcattgtgaaatgtgctggagattcaaaattgtagagaccatctctttctacgatttgtcaaactgtagcttgttaatgtcaggctctgaatttcaaagtatgtcatgttcttttttattttgctagaatcgctaatggtgctctccaccatattaatgatgtgtcttccatggccctttctgccctttgtaaacaaccacaggtgtggattttgttttgtctgtgtgcaaggcttgctgctgagacatttccccattagactgctgcccacagcaccagctgttgttacaaactgctgattcccagccacacagcttttcgtttccagttgcttcagatggtataattcgctgtgtccttgaagcctgcatccatatgtttgggtcaaaataccttctcatcctcactggaccaacataatatcaagaatgttatttctctaagtgtttctcagacaggcttaagagtaaagacgtgactatatgtgccactggagtacaatttttaaaatacctgcttctttccagcattgtcctgtgtgacgtagaatttagccaataaaaatctcctatatttcttatctagttattaaaattaaatctcaaagttacaatcatgcctttttttccagttactttttatgcaatgacatcaatatttaagaaaattgtctgaggaaaaggaaaaagtcctgatgtcataagcaatctcagactattcttcactttaaaaactttattcagaagcctgtacctacaaaatttagggtatgggattatttcatagaaattctccatgattacatgtttccttatcccattacagtttcaacagaagcaatcaatatttcacattatcagtgtaccgtctaccaacatcctattctatctataaaaagaaaaagtcatatagggaatattttgtctattattttcaaagaaccaccactttcagtatttagcatggttcactgtgttggaaatcaaagtgaatgctattctgggaaaaagctgggctttgaggattttcaaagaacaactcaaatgacgttatttgttacctagcttgccttggccagagttctgtctccagcagaattggggccaatcaagagttaggatgctccttcttatcagcaatatcaaagcttctccctctgtttcatcctctgagtcaagggagtcaactaaatactgtaagttctctttcttacatcctaaattgttcttccatcctctcctcctgcacctctctcttctagcacctgaggcctttgagaattctcaatagcatggatgcaacagattcatcaaccttgtggcttctttgcttcaggtttgctcctctgtggtccattccttatgtaatcgactagtgtgatcatgtcattaatgataagaactaatatttatttagtacagttttgttttttgtttgtttgtttgtttgtttgagacagagtctcgcactgtcgcccaggctggagtgcaatggtgtggtctcggctcactgcaacctccacctctcgggttcacacgattctcctgcctcagcctcctgaatagctgggattacaggcatacaccgccacacccagctaatttttttgtatttttaatagagactgggtttcactatgttagccagactggtctcaaactcctgacctcgtgatccacccaccttggcctcccaaagtgcttggattacaggcataaaccaccacacctggcagagtacaggtatttttatgcattactaattaaattcaaaggcacacagatacgccccaaaccactatcaatgccatttttcaaatgaaaacaaaacaaaaaaggcttagagaagttaaggacttgaccacatccaaagagctactaaggggtagattgaggattcaaaccctggactgtctaatccatatgtgaccttgttgtgtcattctatgcaaaatttctatttcacagatacaatatctgattgatatagcttaggtcagattccaccttttgccagagagaataaggcagcttcagttacagttttattaacagtatatctaataaaagaggggtcgattttcaaataaaataaaagaaggttgcaattacaagacgaatgagtactggattggcaaaagcaagacgttcatggtagtttctctcagtaatcaactgaaatctctcattcagacatgatctcaaattctgttattagatagatacagtagacactccaccttgcagtgaatttggctcttagagtgctacaagatggacactaaaatatggattaactgagtggtgtcattgggttcaagaacagggaagagctaggactttgacacccccattaggtggtggcaacatgtttggtaaaattgtgacatattttaccttgacttagagaccttatgcccaccaaggtggtagtattaggaaaacatcaacatattggctatatttttctgccttcagaaatgtcctataagagaaatgaacctacatcagagtgaaactaaaaataatggaaacataactgtgataaaaacaggcactttgaatgctgtacttctcatactttggaatcttgctggatgaaaaaagtatatttttgtaccaccctacagtaagcgggagatataggaaaactggagctcaacaggaggtaaaactgataagattggacaactagttctttccatgcacatcgtattagaaaaagagttccacaggcaaagacacgaaactgtggatttgctgagtggagttagtgggttggagaactggggagagtcaggtggtccaggctaggactgtgacacccccctccactgacagtaacatggttggtcaaactgtcacctaattcaccttaacttagagaccttatgcccaccaaggtagaagaatactaaccagagtaagatgcctgccagcaaatgcagaaataacagtggtgcgttttatttgaaacaaatttctaattttcatagggagaggccattcagctaaaaaaaataagaaacctttggttttaagacagtgtccggtcagatcactaactatggtgatcaggggatgaaattttcatgggcaaaaaaatagactggaagcctattaagtatgtgaggaaaacgttttgccaaggaaacccaaaatctagccacgcttccttaagtcaatcctgagatcttggaactccatttctggggacctgcgctgttatatctgggtagacctgtgaagtatatccttacctataattgaccccagtagggaccatggagaaatataaacaaagaacatcttataagacagaacaagaggccaaaggggatgatgaacaaaagagattcttccagaaagcagacaacctaggctgccccataactgactacagaatttaatccactgtcacggtagagagttttgtcttaacagttctgcccctgtccagcaagatgtgtgtgctgcagattgtagactatagcgtgttcccttcctgtctttttccaaatgggaatctaattgcagtttacaattgcatattcagaatattgggggccaattaagttttaactacattgaacagctatgaaaatccatatccagttactattgagatgaccataaatcacccagagatcttggattcgaagatagataaactggatgaaacttgggatggtcaccctcaaggagagggtaagcacattctaagtagctttggtaatgttaaatatatatttgggaagaagctttaataaggatgtgagacagcccaatggatgaaccataccattcagcattagtagcctacccaatggccatttctcctttcctccttgataacagaaatacgattatgtttaaggtggcaatatgcccagctcctgggataaattatgatgagtctatctagataaatcatggggttcccatagccctttgccaaatactcactttcctactcaccttgcagcttcaggtagccaaaggagacctaagggtgagaatatcaggggtggaaaagttctatactctgataaagggaatatttccctttattttctatacttagaaaaatgtggaagtcattttgtgattatgaagcaagcaatcaacgcaaggataaaaaactcacatgctgcagattgcagaaaagtgagagaatctggatcagatttcttgttaagtaaatcaaccttataattgatgtcatagcggagatttatgttatagttaaaaaaaggtctaattaaaaaaccaattcataagctgtatgcagcatatggaagaaagacacatatttgaagaacagggagcaaagatgatgatcaagtctttctgaatcctgacttatttaaagactactgtctataccgttcttgaaactgttattttcacaaagtattatcttttctttaaactgatgctgaatttgtgtagtatgtggaactgttaataaatatgcaaagggtcaaatcataccaaaatagacaaaacactttactaaatacaactgagtacagttgactttttgtatctgtaggttccacatccttggaaccaaccaaggattgaaaatatagttttaaaaattgtctgtactaaatatgtacagacttttatgtgtcatcatttcctaaactatatagaattacaactgtttacacagaatttgccctgtattagagattatgagtactccagagatgaattcaagtatacagagtgatataatggattttggagactttggggtgttgtttgggaggtgggtgaggaataaaaggcttcatagtgagtacagtgtacacttctctggtgaagagcacactgaagtctcagaattcaccactatagagcttatccatgtaaccaaaaatcacctgtaccccaacctattgaaataaaaataattataattaaaacaataaagtacatgggataatgtacatatgttatatgcaaaaatactataccattttatatcagggacttgagcatccatggattttggtatccaatggagatcctataaccaatcccctatggataccaagggacaactgtatttactgaactgttaccagcaggctgcagatatagtcagatactaatggacacttaaaattgaaaacctgttaagaagtgcactgtacattttctttgtttgcttaaaagcagcttcctagaagctgtctagttctacctcgtgttaatcttttcacatcctacagagttttacagacttttagaatgcatcctggtaagtgctgtctctctaatcattggacttttacttttaaggccagctttacaagatattttcctttaagtgcttgagttttccttgtttagcttctctgatatttttttcaattttacttcttttactctgcttaatactatatctattcatttttatttaatggtttgtttcttccctaactaattaagattctcagtagcatttgactcagctgtcacgccttccttcttggtttccatgacatcacactcctttgatttttcttctccatctatgacatttactcttggtgcttttgctgtgtccttccttgctctatctctaaatgttaagaagtcccaacacgtatgcctcaccttcttctcttctctatgcatgatcttcccatgggtaatcatgttctgccccaattttaaagaaaatatacattacaaggctcaaacattagtatcttcaatcccaatctctactctaaaatatattatctaatatatccaattccctagttgacatttctactcagatatctagagataccttaactctgacatagccaaaaccgaattggtttttcagcccctttccattcttctttcctcagttttccccatgtcagtaagcaaggccaccacccatgcagtagctcaagccaaatgcctggaagtcatccttctttcctctcagtccacatctctcagttcacaagtctgcttactctacctgcacaatacatcttgaatctatctaattccattgacattccaatctaatgtagtcaccaacacctcctgcctgggataccaccataatctcctaactcatcctcctgcttcttttctccccatctcaatatccatttcccataaatcagccagagtggtctttttaaaaatgtaaattatatcccatcacttctctgcataaaaccctcctcatagtgtcctaacacagttagattcaaatccaaatgcagcctccaaggttctccctgggtgatccggctcccacctacctcactgactcatctcacatctctctgcctcactccctatgtgataacttctctggcctcttttctcatcctcatataatcccagtttattctgctttggagtctttgcatgagcagtgtcttctctcgggaaaacttttcctccagatagtcacatagatgaattttacttataatctaggcctctgctcaaagtcagctcttcaaagaagccctctctgaccaataaacctcaacaagccaccctactgctcttggcccatgatgctgctttccttccttccttcccaacaagcactgtcttcctccaaaataacctacactctttgagagcagggactttgcctgactttgtcattgctgtgtgcctgtttcctagacacaatacacatgcccagtaagtatctggtgaattgcaaataagtttattgggttcttacgcattagggaaccccttcctaaaattcccttagctcctctaccttaggaaaagtattttcttttatatgcttcatggttttaagattaatcagaaaagacattttggagctaattctttattcattcaatcaagaaatatttactgtgccaaacattttgctatacaaagaaaaatgagacagcagattcattatctagtggtacagaatggcatgaaaatgagtaagtacaatataaactgagatcaatcaaactactaagatacctactaatgtggccttgtgcaaagggggccagaagtggagtgaaacaaaaatcagtaatgaatacagaagaaggatgacatttgctacatataaatgagtcagaggttgagctctataagctacaaggagaaaagactgcatttgtttcatttctcaatcccatacaatgatgccctccaaaatcacaattacagaaggagagatttttctttgtaagtcacaatgttattataacccgaaagtcaagttttactgaattcaaggacactgcttccaagtatcttatgtgattcaattacacacaattctatattatcataatgcacggtgacagattacatagaactgccgtaaaatagatgctctctcaatttatcctccttctcacagctgccaccctattctctgccagcttccactgcaccctctgtcatcacccactgcccatgtcccatggcttcccattacactctgatctctgatacaaagaatataggactaagcttctaccaacagactggcctgcccactggccttcaaatgtgccttactcaatcctacattctcaacccaactacccatttaaaataccttttcttcttatgccaagtatggtggctcatacctgtaagcccagcactttgggaggccaaggcagatggatcatctgaggtcaggagttcgagaccagcctggccaacagggtaaaaccctgtctctattaaaaatacaaaaattagccggagtggtggtacatgcctgtaatcccagctactttggaggctgaggcaggagaattgcttgaatccaggaggtagagattgaagtgagccaagatcatgccattgcactccagcctaggtgacagagtgagacactgtccctaaataaataaataaaataaaatacttttccttcttgcttctaatattcaaatgctacaagttcttcaagttcaaggggctcatctcctccacgaagtcttcccctccagccactctagcccaccgtgggctcatccttctctgactacacacagcattcactgcctctgctggctatttgcagctttttacaaacctcctggaattgtttaaatgttcatgtatctgagttttaacaatctcctaactagattatttgattttttaatatggtggctctgtcttctagttcttgtctatccatacccataaaaaacagtggtgtcaccagaggaagtgaccagttcccaaatcccagcattttacctgcatgaacatgttttgtcatggtgccacagaagagagtcaggtataggtcaggagtataggttaaaccagtgattgggtttctacttctacaatgcaaatccttttacacttagaccaaaaattataggtgtcaataatcacatatccagaaaattagtagatacaaatagtctctgagataaattaatgtttcttgttgaagaaagaaaaataaactcctttaactgaatagtaatataaccacaaatggtttttgtacataaggaggacaatttctattaatgaatatatttcttttttttttttttttttgagacggaatctcgctctgtcgcccaggctggagtgcagtggtgtgatctcggctcaccgcaagctctgcctccccggttcacgccattcttctgcctcagcctcccaagtagctgggactacaggtgcccaccaccacacctggctaatttttttgtatttttagtagagacagggtttcactgtgttagccaaaatggtctctatctgctgacctcatgatctgtccgtctcggcctcccaaagtgctgggattacaggtgtgagccaccgcgcctggacaatatatttctatataattcagccacatggtctttggattaggcttctggattaacaacaaacaaaaagctttttctcttatctgcaagagcaactttactggctgttgtctccatcaattttttaagggtcagtgctgactccacaagcatagatttggagtagataaactgttaatttcaaataattttctcaacactcacagtggaaagagttattcaggctgctgccctagggtccctttcctatacccctctcctccctctcctctatcctcctctgtcactcttctataatctaccactcctccctggcccccaattgtttaagttgagtttgatcatgctactccattggtaccttctgctgctcttaagcgaatgtcctgagtccttaagatagtggtcagtgatctctagcatgcattttcctaatctctcttgcatcacctctcttctctctcctccttactcactctactccagtcatacttgatttctgtcaactcttagaagatgtcatttcatttttttcttttttttattttattattattatactttaagttttagggtacatgtgtacaacgtgcaggtttgttacatacgtatacatgtgccatgttagtgtgctgcacccattaactcgtcatttacattaggtatatctcctaatgttatcccttccccctccccccaccccacaacagtccctggtgtgtgatgttccccttcctgtgtccatgggttctcattgttcaattcccacctatgagtgagaacatgtggtgtttggttttttgtccttgcaatagtttgctgagaatgatggtttccagtttcatccatgtccctacaaaggacatgaactcatcattttttatggctgcatagtattccatggtgtatacgtgccacattttcttaatccagtctatcgttgttggacatttaggttggttccaagtctttgctattgtgaatagtgctgctataaacagatgtcatttctttttcatcctccagggctgcactcaggagattcccacttcatgaaattccttttccccccaccctctattgtctgcctaactctcacttcttccaattaaatgttacttcttcatgaaggtctctaggaaagtttagattcctctgatgcagtctttaacgacaaccatgaactttctttggtaatactcataaaaataatttaatatctagcggtccactatatatcaagaccccacgataagagagactggtgatcccagcaaattccagtgtctggcatataattcatactcaagaaatttgttgaattaataaatgataatgggacactggagctggaagacctaggttggagccccatttttgcttactgtgaccttggacaaatcacttatctcacagatcctcaatgtcttaatcttcagaaagggcattatcatcacccacttctagtatactgaaagaacaaaatgatatatattcagctaaagagttggtaacttggaaaagatttatacaatttagctgttatttttaattgactaaagatagccataagattcactgagctatatacagccaatacttaatcagcaattgctgtggctaaaagctttctatgcattatctcaaataatgctaacttttacaatacttctagaacgtcagtattgttattatgaagcctctttacaggcggagacaagtcacaaaataagtgatgaatctgagattcaaagtacaaaaggctccaaagcttaaatgagaccacaacaagcctacctcccattactacaaattaaactccattacttagaagaagagagttcagttttcagagcagaaaaactataactttgctcgagtctagtataaagctgagaagcaggtgttttcactatttgaatcattgagaagaatccaacactttaaagaaccctcataatcaccatgaccatttgttaagtgggccttgtgtgccagtctccaggataggcactttacagttgccagtcctaaatttctccaaaaccatcaatttaccaatgagaaaatgagactcaggaagaacaaatcaagcaatctgtcttcctataagtcgagcttcaaggccagggttgatcccacctctctctaactccaaagctgtgctcttcaaactactacctcttagactacctctaagaacctatactgagaagcctcataaaaacatttatccttaagaaaagcatatccattattaagatgtatatcctttctctaagtatgttgtttatattattgtaaaatactagtgaaacagataaccctgtggccaggtatattcattctctattgttgctgcaaagaattaccacaaacctggctgaaaacaaacaaatttattatcttacagtttggtaggtcagaagtctgacactgaactaagactaaagtatttgaagtactggtgctgggttcctttctggaggctctaggaaagaactcatttgtcttttccagcttttaaggccacctacattcctgggcctgtgttccccttctatcttcaaagccaaaaactttgaatctcattaagcattcttctttagtgacatctctctctgaccacagtaggaaaggatttttacctatgaggacccatgtgatcagactgggcccactgacacctgatcaccctggataattgtcccatatcaaggtccttaacttgattatatctgcagggtccctttagccatttgaggcgacatattcacaagttccaggaataaggaatatggacatctttggaggccctttagtctgcctatcacaccaaagcaacagatctgctaggggcccactccacctcatctactaacactctctgggaagaaaagcaatactcagtaactttcaaataccagggactcaatggaaccctcaagacatagcagaggaggcctagaaattagagcgcaaaagtgagagctcctggagacctgtatccatgtcttggcctcatgaatggccataacccaccttagagctggggcatcccaacaaatttcaacatagtgtatttatcatgctgtggctagagaatgagtaacaagtattcggtttacttttttactttcatgtgtaatattcaagtcgcattaccttgtttctaatgaatgtgggagatgtatcagtcttctacacaaatttgagagaatctgacaatgagtagaaagaacaaaggctttggagtcagatggacgttaaatccattatccacatgctctgacaattgctgcatgagcctcagtccctgtatttgtggaatgatgacaatactcacccacacgatgaggatataaggatctaaaccatttatacgtgtacactctaaaacagggcctgacacctacaagagcaaaataaatgttaagccctctccaagcagtctgtctacataggttataagtataataatcatagcaaaaatacgatcttcatttttggatcctttctcttctcacccactcagtaactggaaaagtgcctagtccagattagactatatatatatatatatatacacacacacacacacacaccatactgaagttttcttttccctttggatctagagaataaacccctggtttggatcagtgatgaattaaagagtcagcttgggctagcaagacctaattccctgagtcaccctctggagccctggacactgctagatgacttcacaatactcacacacagactgtgaaacttaaaaaatggtcttgcatgtaagccatggtgggttattaacatacaaaatagattaaaatacataaaacagcccaattcatcatacccagcatatctttaataagagcacaagtgacaactggatgaatgttttccagaaacctgaagacagatttaaatcacaaaataccctgtaatcaaagagtaaatcaccttttcacctaatgctaaaagaacatataaattagaagagtttgtggtaaacaaactaatattttagaagctagttggtgttttctagttctaatcattcataaagcccaaatgaagagagactacagtgtatgtctgactcttgcagaaatagtatctatttgggataatctccccctgattaagcaaaggattataaatccatgacacacttctcaaatcctaatcccccttctctgaaaatgatgcttcctcctatttcgcagaatgcaaatccgttgcacatgtcctccccaaacctaatttattccctaatgtccccaagaagagactcaataccccatattccttcccgagatcaacctaacaacaacctaactgagatataactcagtttgtatatctacaaactgagggtataaacacaaacaacatcccatctctgccccagaacaactcaccctcttagagagacatatacagcaataaagtattgcacaaatagtattcagcacttaggaggagtaaactatatccacgaatgcagctagatctcaaaaacataatgacaagtgaaaaagtcttaaaatacaccatttgtgtaagtttaaaaacatacacataaaacatattaaacactgctcatgcatactgacatgtccagataaaggatattaaaattaatgggaaagataaacaccaaattcatggtagtggttgtaactgcagaggagaggcgattaaaaaggcaatgttgtaggtgataataaatatgtcaactttattgctaacattttatttattttatggaaaaaaaggctggaagcaaatattttcaataattgttaactagcaatttggggcaggaatccccaggtatttgttactgtctacattcttcagtatttttataagtagttaaaattgaaatagccaattgcatcatgtgtctatatggcatatacaaggtacaatagtgcactaaaagaagaatagttctttctattgtgcttttacgccatcgttctccactactcaaccactgttctaatgaggccaatgcctataaacatgcccaaacttttcctgctaaacaaaatgaacccgccagtagttactcccaagaactgctcagtctattccttttctttctcagctaaacttcttaaaagaattgtctacacctgctctcccacatctccttaatctccttactcatatccaagcccactgcaatctggcttctgccccacttaaattgcttcaactcctaactgccaaatcctttcaattctcattttacttaaccatgcaaagcacttaagataattggccaaatattggaaaacttcccttgccttggcgtccacagtactactcttggctgtcattccttttacctccctacatgttccatctctgattccttctcctgttgcagtcacttaattctagtctgtttctctagtagtacattctaagctctattctcctcctaagtgacctcttctgttcgcatggctgtatctgcaatccactggctcctaaatgtgtatttctagccccttctgggatcaagacacacaccttcaactgtgagctggctatctaacattctttgcaagtatcccaacctcaatatgtactaaagcagccatatcctcaaggattccgctgaagattaaagctagacatggggaaaacttctctactcctacttttcttccacttattctgatacagattgtcttcttgattatacctgctactgtatctcttgaatgcaacacctcttctctaccttccacactgctttaattcaggtctcctggtctacattgttcgtaccatttttctaactagttcccatgacttctatggaactgcctcataatttcctgctaaacagaagcaattgactttaccttgcttaacaccattcaagagcctgcagattttagtttaaactcctcagtcataaaagcaaggctctgaaatagtctactaccatctacttttccagtcttacttttggatacatttttctacactgccagtattcaagccacatggacctctcaccattccctgactatggctcgatttttcacacaaatctgagcctttgcacaggctgatcctacctctaaatccctctctctcctccacttgataaatctcaacacagttttttaagatccctttgggatgtcatttccttctgcaacgtttccttagcttctctaagtaggtagttattcctgcacctttgcttccatgaaactttgtagctggctctattttagcacttacgtcatgttgctctaagagctacttgtccacatgtccctctctcccagtgaattgcaagcaggtgctagtcttttgtgatggtttattaattcaatgagtatttgagagccaaccatcagcagaccctgttctaggcttatgccatatactgaacaaaacagacaaactctaaactcatggagtctcaattgctgagaaccaaattatgattagtaaacctcagtcatgatttggagatgtttaaatcatcagtaaggccattacaaaatcagagtgttaactaatcttactgtggtagcttttgcatgtcattatagaacaacatctctaactacagcccatcttttacttctttgcaccagtgacagaaatatgcacctacaataggagctttaaatgattgaagctcagcttttttttttttatgaaaactatccttttctttgttttttttaaattatactttaagttttagggtacatgtgtacaacgtgcaggtttgttacatatgtatacatgtgccatgttggtgtgctgcacccattaactcatcatttaacattaggtatatctcctaatgccatccctcccccctccccccaccccacaacaggccctggtgtgtgatgttccccttcctgtgtccgtgtgttctcattgttcaattcccacctatgagtgagaacaggcggtgtttggttttttgtccttgggatagtctgctgagaatgatggtttccagcttcatccatgtccctacaaaggacattaacttatcattttttatggctgcatagtattcaaatgtattcaatggtgtatatgtgacacattttcctaattcagtctatcattgttgggcatttgggttggttccaagtctttgctatcgtgaatagtgccgcaataaacatacgtgtgcatgtgtctttatagcagcatgatttataatcctttgggtatattcccagtaatgggattgctgggtcaaatggtatttctagttctagatccctgaggaatcgccacactgacttccttaatggttgaactagtttacagtcccaccaacagtgtaaaagtgttcctatttctccacatcctctccttgtctttagatgcctgtaggaccccttccaagagacagtatacaattacacattgtagttgggtaggccaatactgactcagtttctccacaagtcagcagacatcagacccacactgcatggattcaagaaacagaaaaaaacacagacaagctctgtgtggttgagtcagaaaatgtccacatgttagtgtggtaacctataccatatgccttttttaaataggcactagtaccatgagtatctaatgtaatctttgagtattttgcagacagagaaatttaggcttctccgtaactgatacatgtgtcgtgagtgaaacagtgagaaactcggaaaacagaaagaatttgccactaacaaaaaaggacaatgcagtgtctgatccatgaagaaaagttctcagctggaacaggaacaacagtaactggcctgaagccttgaggaaggatgaatagttaataagagattgcaaggaatcattacctatgtgatacttgctatttgtgttagcaaacagataaatatatagggaagttacttgctgatacaattgcacattgctgatagttctttgccgctcactggtttgttttaggctttaaagtcttctatatcagacttttctctttatactagtaaagcataaagagaaatgcctgtacaagaggttaccagtatcattttactggtgttctgacagaaatcaaaactttcaggccagtcaactgagcatgccttaatttaaaggtcagatacaaggatgaggtgaaccagaccagtgaaatcctaagtctggtgtgatcatcactgggtgtgtacacctggaatcagcaataaaatattactactgccattgtatctactattatctaagaaaaaaaggagacaagctctattaataattagcatacatacatctaaatgtatacatgtataatctatgaaaaaatctatcaaaatgaagaacatgccctagatattttacagataggggtccatgatcaaaacattttggagactgctgacctagacaccagatgactaattgtgagttctacgtaacagaccacagtcagatttcagaggtaaagcaaagcagaaaagaaaaggtaaacgaaaaaaaaaaaaaaacagaacaccaaaatagagaaaatgaaaaaattattccagatatcacaagggcaagcagtacaaatacatgatctacagtttgctgattatagaaatattgtcttctgttttttgctgggtgcagggaccaagatcagataatgtgatgtgactatttggttatcttgttcccctgcttaaaacctgtgatcacttctcattgctcttaaaataaagtccaaatatttaataaaactcagactcttagccatctggaccttatcttttgtcacttgctgtctttttgcaggggtggaatggggggatgggaaggacctcctcatttcacgtatgttctctaaccttgttcttgtctatctctaagtgtaattcaaatgttgacccaatttctaattcctttaatcattattttctgacttataaaacatattaagtctttttcccatatgttcctatagcctcctgtgcttgcttttctgaaaaactcagcatactcagaatgtatttttcaaggtctttcttccttgctagccatctgtgaggacagggaaggtatctgtaaccccaaagcacacagcacaatgtttgatgtataagaagtgataaataaatgtgttcattggagtgaagttgaatgaaatgtgtcctgacacccagagagaaaaatagtttgcctctgagctgcctaagtacttgctaatttaataggatgatggcagaaatatgagacttacctaatagttaaaataatatttgactgctgttttatcagtacctttaaaggcatttcatattccactggtaaacaaatatttgagtgcctcaatgggtcttgaaagtgctatggtgtctttactctgggttggcagacacccaacaattaattaaaactgctttcattaaggcataatattgaaaggattcatgacttattctggcaggacagaggatagctgaagttcattgcttacagtaatgttatgtattctgagttggttagtcttagcaagattccctgtgcccattgtccttggagggggttggaaatgcaggtgcatgatcaagcagtggagggaagggagtatgagcagctatgcaaatgcaatgctccagataaaaatctctttgcccaggataagatatatccttcagaagcttgcctatgtactgcacttccaacgactaggctgccccagactcttatcaggcactagtttgtccacagtggtcattttcatcaattccttcaactcaagctcagggaggccctgcaggttactttcattgccatccaaacccctcaagcatttaatggttctttttcccaacccacaaacctaagtactaaggtttcctcttcccatgtaatcacttcccaccaggctccaccttcaacactggaagtcacaattaaaaataagatttgaaggggagaaaatatccagactatataagatctctatactgtatataacatagaaactcacagggagattttccagttcatttgctctttaactgcatgcaccaccaaactggacaacaagcactaattcaactaagccaagcccagtcctcccagaatgattctagctcagctcagagtaccacgtgccaccctccactcttcccctgtccttccctgtccaggcaggacagtcaagaaataagagttcagagtataggctgtggagccacgatgccttggttaataaatacacccactctctcaatcactggatgtgtgactttgggcaagttgcttaacccctttgagcctcaatttacttatcaataaaaaggatatttaaaattgcttgagtgtccctcttaccagggtattcctctagcaccccaaatataatattgaactcaatgcttttgaccctatgtgcatgcacatgtacaaacacacacacaatttctttcttctgtcctctgtcatctgaataatatcctcccatcaccataagcaaaggccttcatcagttaccccagctggagtatagagcctgcctaggtgcatgtccttgactcctgctcctccttgatctcccatctaactccacccacacattcaatcagttacaaagaccaaccacaatgccccaagaaccttccaccaacacccttctctaactataccttcctacttaatgcctcgacaactttgatgacttctcaatgacctttccacctggaaactctcccttctttaatctttcatttacatcagacaagaggactcttcctaaagcatcactttgattatgccattattgtcctcagaaaccttaaatgcctacccactacataaaatccacgtttcttagactctccaatctcatgtcacagcctcatcacttctcaggtcaccacctatgccatccaaactgctgtccctacacatttattcatgcctccccactaaatgcttcttctcaatccctctgaactccactggctattcagagtgcagctcttccacagaatcttccccaacaagtcaccccagagtgacctcctgttcccttctacactagaggaccagatttatcccttccagagagcaaatgtcacttcctcagaactccctccctccacgacccccacatattcccaatctttcctctctcctgacttctcatcctcatgattaaagaacatttttctcaggccaaataattataaaaatgaccacaactcacatttatagggccttatctatttgtcaggcactgtgctaagcacttcatatgcattaattcagttaatcctcagtgcaacctggtgatataggttctcttcagtgattcgcaacttaacatagatttgagtacattttcatagaaagatagtagaaaataaacaaatatacccaaaagaaatgaagattatatatatatatatatgcgcacatgtatagctacacacacatagtatatataaaacagcattatcaaataatagtatagcatatatcgtatgtctatatttttttcttttacgaagtatataaaaactatgaaggaaagtaaagcagggtaaagagattgagagatgacagggattgagagatgatatggtttggctgtgtccccacccaaacctcatcttgaattgtagctcccataattcccacacggaactcactgagagataattgaatcatggggcggtccccccatactgttctcttgatggtgaataagtctcacaagatctgatggttttataaggggcttccgcttttgcttggctctcgttctctttgcctgctgccatgtaagatgtggttttgctcttccttgtcttctaccatgacggtgaggtctgcccagccatgtagaacgtgagtcaattaaacctctttcctttataaattacccagtctcagacatgtctttattagcagcgtgagaacagactaatacaagaggcacaggatgggttgttatattagatgaagtcatcagagaagtaccatatcaacagagacccaaatgaagtgaggaagaaaagcaacagaattaccgggcaagaatggtccaggcacacattaagaaactaaactacagagaggccatgtggcttctcaaggtaacgtgatagcaggcacagtatgtgaatcctaattctgactccaaagtcttatccttagccaccaatcctcaccttccattaatgttctgcagcagttcattctattagccagctctggatttttaaaactctcttttttccctgttagttaacaaatatgggccttctacatgccagtcactgacctccattcattggaggtcacttacctctacaatttcttctccaggtataacacgtttccctggtttcacctctatctcccacccttattctttacagttctgactctagactctattccttatccagttcatgacttcagttaccattatctttctgcaactaattcccaaactggcaccccagtttaatttgatagccagcttcttgggagcaagactgtgcctcattcatctctctattcctaatactcatcacaatgctggacgtgtaataaatgtgtgcttctctgaaatggattaaatttggactctgcatttccatctgcctttgggacagtttgacctggatgttttcccagtatctcaaaatcaatatttctaaaaatgaacacattatcttccctccaaaacctgttcctccgcctatattccttgtctctcaccgcagcaccacaaagtatcacagtcaccaaccttgccatctttctcccccacaacagtcatctcacctttccattcccactgcctttacccttgttcaaacgtttgttttctcttgcctagactaatgggaccgcctcctcatgatatcccaactaatggtacttcctacacagctatgcaaaattaattcccttcattctgtcactttttgtgaaatttgatggtcttctatccacaaaattgaatctcagtatcatgttccaacccatatggcccaatacctattgggcatcttctccactttgatatccaagaagcccttaaatttcattgttcttcaaaactaaccattcaggtttttttcaaccgaacctccatctctgtatttcccatcttggtaaatgtatgccacccaacagttcccctggccagaaactgagagttgctcttgtcttctatttgtctgatgtgtactctctgccttccactgcatgaccaatgccttgctctgtccttccttatgtctcacctgcagctatgccacacaagtctctgcctgctgttttactccctttttgtccattgactacgtcaccagttatattcccagtgtgcaaatgtggtcatgctgtgctcttgattgaaatctatcagtagttttcatactgcatcacatcttgaccgtgactactgtccagcttcccatctcatagttttcttcttccccacacattcccacaaaaccatacaaaattcttactgttccctgattgtagtaccatgttctcttggtccagcctcaggaccacagttctccctgcctgaaacattcaaaattcacctgccatctgtccctgaaaaattcattctcattctccagtcctatctagtctaagtagctttctacgactatcccacttgcgtagtatgacttatacctgtttccaaagcagtctgtgcttggtgttattacagggcttttgaagttctaattttcatctctcatttctatctctttagattcagggcttcttttccatgggatatttttcaactctgtattctagtacttagaagaatacttgggaaatgatgttcagtatatgttttgtgaaagaatcaattggctcacatttggggaagcccccatgatatgaaggagtagtaatattatttaatctacagaataatgctcttttctacgtaaggtttgtgttgtattatacatgattctgtattatacacgattctgtattatacacgattgtgttgtatatacacgattctaaaaaactactatcactcaataacaaaccatgtgattatgatagatttactgtgtgttccttcagcttattatttcacagaagacaaggactgcacctactgatatccttcattaagaacatacgatggggtcctaggaaggtatttagcacgtggctttgaagatgaaataaactaacatacgctgtgtaattaatacacaatttgggtcaagtagaattctggggtagagaaggaagatatgatttaaatgtttaattcctataccttaaacaattaacatatctttttatattctgaaacttttactagcactgtgtctctcatataggaggtgattgataaacgcattttaaatgaatgattgtttaataacattctcaaaaatatttctaaaactacacaacacaaattacattaaggctgaaattataactgtcattgagatctaaaattttgctgtaacagtagttatggaaggccacaatctcatgctcagggatccaaggataaataaagctatgtcttaaattgcaattcttctaacaagttagttttacccttttacagtttaatcttcccattgtagtggtggtggacttttcattctcactgtttattctgagaggtgaacaacaattttcaaagtactttttaatgactaattttcatttggaggttacatccataactttaactagaggacttacagggtgtagcggagactcctgtacttaaattacatcagaagtgttagtatttattaccttccagcttcccagtttagatgtgtgccctttcttaaaaactatcttacaacatctccattttaaaagatgagatttattctataaatccacagtaggagaattccctcactccatgtccctggatattgtattttacaggttctggcttcctttttccatgtttctcaatgcctggttctgcactctcattgttttatacttgtccccaagattttcctccccacaacttttaaattaacacagtgcacctacgtttcagagtatgtgccaactctctcagatatcatgacttcagcagaaaatcctgatgaaactggaccatgagcggacagggaacagataaccactgcaataatactgtgcatcaaagtagaaaagactcatcttcaaattaaagggagtttatgaaagtagatgatatggaaaaagtgatttaaaattcttggaaaggatgtgagaaaagttgagcagaatgtgactttcacaagtgcttgaaatattagatgatgtataataatatccctaaaataagtgattcccaaaattaagtttaaaaattagagaaacatcctatttaatttgaaaattcctacaccaatttgaaatgcctctgcctacaccagaacatcatgtaaattcccaataagagacctgagcattttcaaattcctttaggattatctttaaacagaagttatagctcacttgaactctccaagcttccaaatcatatgttttatgaaaaaggtacatttctttacagacttccagtatcaaagaaggtttttaaaatctttaaaatagcttagataatgtaatgtctttaggtgactgaaagataaacccatattacaattagaaaaattggtagagggtaggaagaaatggaaaatagaacaaacacagaacttcaagcccacttcttctcatagctttattctataggtccccaaagagtaaaaggtcaagttcaatatcactgtgtgcttccacttggacaggaacagcacttataccaactggaagtaattttgcttttaaatatccatctcacttcatccttaactctgttatgagaatgaatattttaaaataaacatgtttaggcatttattttctcctcaacttgactatcaatgcctcatgcatattcagttactaaatcttggataaacagtaagctctttagaagtagactctatgtctcagtcgtcccaatactaagtagtttctttgtaaatatttgctgaattgatctcatttcatcattacaggatctttataagctacaagtagatatcattaccaccattgtacagaggaaaaaagaaagaaacagcaacattaaactcaatggctacttcatatattctcgcctttctaaattaaattaaaatttctctaaattaaacttctctccaaatttaacttgttcttaatactatatctcacagagttgttttataaatgtctgtttgttagttctatattattttagtttttttttctcaaattccctgtggacacaagaagactggaggatcagttccactacagtagaatgggttggagtacaaccctgtatctttgcctttagatgtaactataagacacttttattcatggagtgaattaccatatgcaaagcatggataaaaggtatgggctaggccattttttaaagtagtttctcatgctatcataatgaatattcattaaattataaaaagttataacccaaaataaaacccctggcagaatatctatttggagatgtagatcggtttaagagctacatatgctatatatacccaatattatcatgaaactcatgaagacatttagaagtcatgtcttttcttgtaaaaaacaaaataataagattttcagacatcttatcatatgtaacaatgtacaaacagcacaacaaaaaaagacagattgtgggggaatcgtcattagactgcagtagatactgctatcagtccaatctgattttgattctgatctgggctatgataatgtcacttcttaaataaactgcttcactcaaaagctccttcagaatattaagaactgttgacatctggagatggaagtctatttttcctccaaaacctttttgtagtaaagacctattaaaaaaaaaaaaacagatctaattccctaaagacttttcatgagcagatgttgtctgaatacaaaaggggacatttccctaagccaatacaaatttcaggtaaccaaaaagttaaaaattgttgctgtaaaatgttttgaggactcatttttacctaaataaataattggggtgggacaggtagagggagagaagtttctaaaaggtcaataacatatccaaagggtatttaaactgacaatctatttccaatgagagagccactcaaccacactggctgtgttcgtttaggaagaaaaatcagccttaacatgagcatgaaggccaaatgctcaatatggaaaattctatatttatatccatgttcaaattattccttatattgtcagagtgtgtgaagagcttttatgtttaaatactgacagtcacccctttttcaggttttctaatgctacgtgcatgtgtgcgcatatagcacagcctgtagtgaaaagactgggcaagaagaggagatacagccacagcaatgacagcaaaggagctgaacttctgcttgtctcagccttgacacacttttcacttcccacttacttccctctcaatacagcctgatttttcactgtgaaatctgatataaaaggaaatgcacctgaggaaatgggtgtatatacactgaatgacatctccatgcctttttaaattttcccattcctttccacatccactgctgtaatgcaaggatctatcatctgatgagaataatggtggtggatgtggtggtgtaggcattcactcactgaggggaaatttacaaaggaccatttgtggggttaggggccaggagatgtgaggcccctcagactactgatgttggaggtgatcattgatctggaagggagtaagaatgagggaatgtcatagtaacaacacccaaagatgacattgatgactgccctaaatacacaaaaacactgggcatctattaagctctttttcagaaacactgtacactctgatagtcatggtgctatagatgcaagaacattcacagttcaaaggagcattatcttgatgtcatgtactgtgctcataaactcagtccactgaatggaaagacatggagccaaaagtcactttcagccaatggcttaacatgcaatcaaatgtgaattgtaactttggtctttggtgggtctaccatgggacaacgtgatttaattcaatcaatatgtttaaatatctactagttttttgttttgttttgttatgttttgtttttgagacagagtctcactctgttgcccaggcaggagtgcaatggtgcgatctaggctcactgcaacctctgcctcctgggttcaagcgattctccctgcctcagcctcccaagtagctgggattacaggtgtctgccaccacgcccagctaatttttgtatttctagtagagaacgggtttcatcatgttggccaggctggtctcaaactcctgacctcaggcgatctgccagcctcggcctcccaaagtgctgagattacaagtgtgagccaccattcctggtctaaatgtctactagtttgtgaagcattgtagaagtgcttactagaggtacaaaaattagtaattcttgcatggtactacttgccatcaaaaagtcaacagaacatctgcaaatgagacaaattatgtccagtgaattctgccttgtcattcagatctatatcaacaataaaagaaaaacaacttatgaaaattcaaagaataattatttggggaggagtcagggagaaatcagtaagcccgcaagagaaggacactacatttcagatgtgtcttgatggatatacagattttcaccaggcaatgtgagggcaggaagttaattctaagcagtgggtaaaacaggagatatagctggttatggtcccagctactcaggaggctgaggcaggaggattgcttgaggccaggagttcgaggctgcagtgacccataatggcaccactgcactccagcctgggcaacagagtgagactctgattcaaaagaaaagaaagaaagaaaaaaggagatatgtttggagaccagggaacagttcagtttagccagatcaaggtgtagacccagctgcgtcatgattttcgtaggagccttgaaaatcaagctaaggaatttgtatttttgattctataagtaatggaggggggcattaaaagattttgtgcaggagaatctatgactcaagttaggtttcagtaaatttagttggttttgagtggggagaagcagttagtgcaaataggatgtaaccctcatggcctagaaaggatgctgagaacataatcttggtggtagaaatggaaattgaaggaagagacagatataaaatacagaaagaaccaacaagtcttggtgacttattcatcatgatgagaataccatagagaaggagactcttgcttttttttttttttaacaacatgcctcaaaaaatgttgccacgataattgttttcagaagatagagcatgtctttttagacatactgactttaaggtgctggtaaaactttcttatgagtctgacgagcagaagaggaatggagcagactatacactcaagagataactccccatcaaaataagaatcaaagccacactttgattaggaagagagtatagagggagaagataattaaaagacaaccatgtgaaaggctgcacaaaatgggcaaaaagaggaaataagtgtcataaaaggagatctggctgggcgcggtagctcacgcctgtaatcctagcactttgggaggccgaggcaggaggatcacttgaggtcaggagttcaaaaccagcctgaccaacgtggtgaaacgccatctctactaaaaatacaaaaagaaaaaaaaaattagtcgggcatggtggcgggtgcacccgtgatcctggctactcgggaggctgaggcaggagaaatgcttgaacccaagaggcagagattgcagcgagccaaggtcacgccactgcactccaccctgggcaacagaatgagactccgtctcaaaaaaaaaaaaaaaaaaaaaagagagatctgagagaaatcagagaaaggagaataattcagtgcaagtgggaaaggcttcattcattcaatatctgttgttgagcaaatattacaagtcagacttcatgctcaatactggggataaagtggtggacaggacagaatacttctgctctcacagagctcacagtcttccaacacatgttggtaaacagcatgaaacatcccagtgagttcaggacgacacgaattgagaaaagtccctcaggacctttaaccaaatgaatacttttggaatgaaatgggtgcttcaatgcccaagggtaaattaatttataataatgggtgcagttatataattttgaaagatttttcagacttgcaaaggatccttgaacaaacaaaatactcatctccccacaaccccctccctgcctcacacgttaatctacttgaaatagtcgctaagaagagaggctattaagtaaaaaaacacattctgttatgtattattgaaaagcaatattattcacatgttctggaaaaagtgagaacacgaaaaataaataaaaggacaaaaaatagtaagaagggcttaataatttaagcccagaaatatatcttcaaaacaatcaaccactacctggcctacaattctccagaaatcttgcacacagattttatattgcatggctcattaatttccaaaccatccacagctttattttatgagagggcataagcttcaggcctggggagagagggtggctgaatttcaacactttgtcctatcatttgtttagtacacctcttacatttatatgacataaagaaaataaaataatgattgtatgatgaaaagcttttcatggattcagaataaatggatttttcaatattacccttgtggaattactaatttgagtttgccttatttttaaaacacatgaaacttaagccaaagccacgatacatccatcaaatggcaattcaaaattgaagacatttttttactctactattgaaacatacattttcctcatttttagttgtagattacatcacataacatctgccatctctaagttagatggcacaaattaaggacaccaatgaataattttgtagttttttttttcctctgaccttgtttctgattctctttcaaacatagttgaattatcatctccctcagtctctccactgttagcaggattacgttctgattttatagcaggagtgcaaaatatgggattagacaatgaaatgaaaaatgtattttggtcaggctttgggtttaacatggaagctggcagggcaaaagtgagcactctaatttgtaagaaaccttctctacttgtatgtacttatgcacaactcacccattttctgtcctctctggcattaacaatgtcaattacagtgatttacaggtggtgttcatcagttagcatactagatgcgtttacttgttgagaagagagtacggaacgaactttttaaactaaattattataaagtttcagaattgcaactcgactctgttctgtcatttccaacatttcctctctactttccattcatgtagtttcatcctttgcctttcagcaaaccatttttcacagtgttctatctctaagtcaggtcataaaatacatacacgtacgcacacagactcacacttctctaattcttgatttctctatcatccacctacatttctctcagttagatcttccagttaaattttgcttagattccagctaaatcatcttataaacctccattccagagatatatattcaaggaaaaactgtatcatagtacaagatagtttgggagttatataaatagcctacttattggaaagagaacaagagatcgggactattattttaaaacaaaaatggaagacagagtttaagcctttaaaaatcatcccttctcatcccaggattagtaaagaccatcctatatctgatcacaagtaagcaaagtacttatgcatatgtttggtgaaaatagtattacatatttggggatcattctctaatattagctttgaagcaatatcaacaagaataaaaaagataatccaaactatttttttctttattcttctcatcatatgacaactaactaaaaatttgtgaatacaattcaagaaacaggtgtcaaatcaattctcagccagaaaactcatcactttggtctcaccttagccaaggtataaaacaacatatttctgttctctaaataaacagtgaacacatgctgattctggagatagcagtaaaaggtttgcttttttaaatgtatagtactccccaggtgtgacttcatcttcatttcccatttatagtgattatggccacccatgaccctgtgcatagtctagacatgctgattcaatccccatccggttgatggaagaacaggtacagtcaaagagctgtggtcactgaggagccaagcaatgcaagccatccagatcctgagacgacattcctgccatctgctccagccttgagttccctgggctgccgtgtgtgaatgtgtctctaataggacagcgctagccctctaccctgtttattctaaagaactgcaaagacagagaccctacgaactcaactcaacaccccaaaactactcagccctctacattaaacacgccactcaggaaacatttgatctcttaaagattgtaagcatttctcacaagagataatctacttatgcttggctcgtaatgagtgggcatctccaggcataagtgaaaacagaactaaacacagttacaagtcaaatgtggggctttacaggtgatgttcatattattttttccagtccaaaaggattaagactgttctctttaaaatttcatattcaagtgagactagtgtcctcccggttacgatgaccttaactattggagtgaggaaaagaaagggagggtgtccatttccatttctcatggccataaattcgaatgattgactcaagttgttgaggtgactccatttccctgagtactaaagaaggcagcaagtggaaacacctctttgcttgcaagtttacagccctcgagtccaagtttttcaccctctaaacccaaactatgctatagccatatgtgaccccttagcttatgtaatcagggagaggtccagccctttatcactctcatgtgccccaaaatcacttccattctctttccggctcctgtaaaatactctgtacacatcaaaaccacctaataacaaatcgatgcaacccaagacgctttgtggaagggcatcgtctcctatttctctatggatcccaccaaacagcaaaacatttctccctgctttcgcagaacgcacgtttctctgaaagccaagctcctaacacagtgcccgataccttaacaaggctgtactgtatataaattatttgcaagtgtcactgaggaccattttctctgaacacactaaactgaagctagccataaaacaagccatacgctcctgctttagaatctgacatgggcaagatgccgccagtatattaccaggggacaaaaatacagttgtaatgaagaaacgtgtgggggcatgaaggaaaagtggaaggcgaggatcaatactatttcagctcattaatccccaggtgttaggggaaggaagcgtgcggtctggagtcatctggcagatgcataaacaacctcggaaattttcagagaaggcaaaagtacgcacaggatcgcaggggaccctgccaccggcgagtttcaaacacacttcaaacatcttttcttccccgacctggatcttgcatgcacccccctctcctttgcaccccattcctgccgctcccacctccccttcccagtcccgccaggtgactgtgtctcatgcagcgaaggcaacaagcgtccccagccgaggaagggaaggggcagccgtcttggctcgcgagggaaggagggcggaagcgggcgcccgctcgcaagcttattgcatcctaccgcctgtagagctggcctcctccagctgagccgaaatgctttccaccctcctcacattcatgtctagggacgcagggtgcagaagcgagactcgagagtccaccggccaggggcgtctgtccacgggtctgcacgggagcgcaccgccgctcggcccgggggcgtccgtggcgctgggagcgagagcttcggcggcggctgcgggcagggcgcgcggagcgggctgcaggtgcgggcggaggccggcggggggcgccgggggcgctgcgcggcccttggcggcgggggcgcgcggggtggcgggggaggccgaggcgccggcagcttcgcgccggcggctggaagcgggcgggctgcacgggcggctcgagtgcggggaccccagcccctcgccctcgtgagcgccgcccctgccacctgctgccaagtcaccggactggggatgcggggggcggggtgcggggagaggaaagcgccgcgggtggcacggtgcctctggcgacagagtagatggacccgaaagagacccgaggtgacttcgggctgggcaggacacccccgggagttgccagcggctctcagcgggcgcctctaggaccccttgtcactgcgagcagcgcctgctctggggaggggctcgaaggcgccgcgccttctcaacgcgccgctgcgtcccccaggggctccaacttggacagctagactggaaatactgctgcacaaagttaggctgagttcgaaggacaccagagaggaagcgcaaggagatgcccttctccggagccgggcagagcgccagaactcctagacgggaaactttcccccattgaagctagaaccggtcatgcgactcggctaagtgtggggaaacactggctctagactccaggtgaacatcgcagggccgaggtgcagaataccaccttggagagagggggtggcatagactggtggcattttggagaagcatccatgtggggggtttcatttgagatctcccaggcaggtcaaccaggaggtatcgctcaccacccgcaaggtcatttgcccttctaaagcacagtaaggccgggaatagttgggaaggtaaagagaaaccaatagaccacttgtggccatggttactgtttgagaagtcaaaattaaaatgcagatttctgtgtccccaagagtcaagtgcatgaagcctctcttttcagaagaaaggtcaagttgacccgttctccaggcaaactgaattaaaattccctctcactctcagctgcaaggtcagttggccatgacttgggtggaagccatttctaagtgtttgtgaaactatttgccttccctatggctgctggattatttatacacactgtcaccaagtgaaatcttccccctttctccaagtaggtctcaattgacaccttattgcccttctccccacccccaaacgcacgagcgatttacttagtcctttgagcccttgtagcatgtatttgtatatttcttgagagccttttactcttttagttcattgttaaggagacagatgctgacaccccattgtctgggttcaaatcctagttccactacttcataatcctgtggcctggtacaaatatcagctataactggtacctacattattgttttgttgtgaggatttaagaaaatcaatagatgcaaagggcttaga
